(19) United States
(12) Patent Application Publication
(10) Pub. No.: US 2019/0284293 A1
(43) Pub. Date: Sep. 19, 2019

(54) COMBINATION THERAPY WITH ANTI-CD73 ANTIBODIES

(71) Applicant: BRISTOL-MYERS SQUIBB COMPANY, Princeton, NJ (US)

(72) Inventors: Nils LONBERG, Woodside, CA (US); Alan J. KORMAN, Piedmont, CA (US); Bryan C. BARNHART, San Francisco, CA (US); Aaron P. YAMNIUK, Lawrenceville, NJ (US); Mohan SRINIVASAN, Cupertino, CA (US); Karla A. HENNING, Milpitas, CA (US); Ming LEI, Princeton, NJ (US); Emanuela SEGA, Cupertino, CA (US); Angela GOODENOUGH, Morrisville, PA (US); Maria JURE-KUNKEL, Plainsboro, NJ (US); Guodong CHEN, East Brunswick, NJ (US); John S. SACK, Lawrenceville, NJ (US); Richard Y. HUANG, Bridgewater, NJ (US); Martin J. CORBETT, Mount Holly, NJ (US); Joseph E. MYERS, Jr., Flemington, NJ (US); Liang SCHWEIZER, Shanghai PR (CN); Sandra V. HATCHER, Hillsborough, NJ (US); Rachel A. ALTURA, Belle Mead, NJ (US); Haichun HUANG, Fremont, CA (US); Pingping ZHANG, Cupertino, CA (US); Edward J. HILT, Yardley, PA (US); Michael Nathan HEDRICK, Doylestown, PA (US)

(21) Appl. No.: 16/081,115

(22) PCT Filed: Mar. 3, 2017
(86) PCT No.: PCT/US2017/020714

§ 371 Date: Aug. 30, 2018

Related U.S. Application Data
(60) Provisional application No. 62/305,378, filed on Mar. 8, 2016.
(60) Provisional application No. 62/431,987, filed on Dec. 9, 2016.
(60) Provisional application No. 62/341,220, filed on May 25, 2016.
(60) Provisional application No. 62/303,985, filed on Mar. 4, 2016.
(60) Provisional application No. 62/363,703, filed on Jul. 18, 2016.

(51) Int. Cl. C07K 16/28; A61K 9/00

(52) U.S. Cl. CPC C07K 16/2896; A61P 35/00; A61K 9/0019; C07K 16/2818

(57) ABSTRACT

Provided are methods for clinical treatment of tumors (e.g., advanced solid tumors) using an anti-CD73 antibody in combination with an immuno-oncology agent, such as an anti-PD-1 antibody.

### CROSS-REFERENCE TO RELATED APPLICATIONS

[0001] This application is a 35 U.S.C. 371 national stage filing of PCT Application No. PCT/US2017/020714, filed Mar. 3, 2017, which claims priority to U.S. Provisional Applications Nos. 62/431,987, filed Dec. 9, 2016, 62/363,703, filed Jul. 18, 2016, 62/341,220, filed May 25, 2016, 62/305,378, filed Mar. 8, 2016 and 62/303,985, filed Mar. 4, 2016. The contents of any patents, patent applications, and references cited throughout this specification are hereby incorporated by reference in their entireties.

### SEQUENCE LISTING

[0002] The instant application contains a Sequence Listing which has been submitted in ASCII format via EFS-Web and is hereby incorporated by reference in its entirety. Said ASCII copy, created on Aug. 29, 2018 is named MXI-548US_Sequence_Listing.txt and is 840,950 bytes in size.

### BACKGROUND

[0003] Cluster of Differentiation 73 (CD73), also known as ecto-5′-nucleotidase (ecto-5′NT, EC 3.1.3.5), is a glycosyl-phosphatidylinositol (GPI)-linked cell surface enzyme found in most tissues, but particularly expressed in endothelial cells and subsets of hematopoietic cells (Resta et al., Immunol Rev 1998; 161:95-109 and Colgan et al., Prinergic Signal 2006; 2:351-60). CD73 is known to catalyze the dephosphorylation of extracellular nucleoside monophosphates into nucleosides, such as adenosine. Adenosine is a widely studied signaling molecule which mediates its biological effects through several receptors, including A1, A2A, A2B, and A3. Adenosine has been shown to regulate proliferation and migration of many cancers and to have an immunosuppressive effect through the regulation of anti-tumor T cells (Zhang et al., Cancer Res 2010; 70:6407-11).

[0004] CD73 has been reported to be expressed on many different cancers, including colon, lung, pancreas, ovary, bladder, leukemia, glioma, glioblastoma, melanoma, thyroid, esophageal, prostate and breast cancers (Jin et al., Cancer Res 2010; 70:2245-55 and Stagg et al., PNAS 2010; 107:1547-52). Moreover, CD73 expression in cancer has been linked to increased proliferation, migration, neovascularization, invasiveness, metastesis and shorter patient survival. CD73 activity has also been proposed as a prognostic marker in papillary thyroid carcinomas. While CD73 has been shown to regulate cell-cell and cell-matrix interactions on tumor cells, CD73 expression and activity has also been linked to reduced T-cell responses and implicated in drug resistance (Spychala et al., Pharmacol Ther 3000; 87:161-73). Thus CD73 can regulate cancer progression both directly and indirectly, which highlights its potential as a novel therapeutic target.

[0005] Given the ongoing need for improved strategies for targeting diseases such as cancer, methods of regulating tumor progression through multiple mechanisms, as well as methods for regulating CD73 activity, are highly desirable.

### SUMMARY

[0006] The methods provided herein generally relate to the treatment of patients with cancer, for example, patients with solid tumors (e.g., advanced solid tumors) that express CD73. Accordingly, provided herein are methods of treating cancer comprising administering to a subject with cancer a therapeutically effective amount of a CD73 antagonist and an immuno-oncology agent, wherein the subject has a tumor that expresses CD73.

[0007] Also provided herein are methods of treating a tumor that expresses CD73 in a subject comprising administering to the subject a therapeutically effective amount of a CD73 antagonist and an immuno-oncology agent (e.g., an anti-PD-1 antagonist, e.g., antibody).

[0008] In certain embodiments, the subject to be treated has tumors expressing CD73 on the membrane of tumor cells. In certain embodiments, the tumor comprises tumor infiltrating lymphocytes (TILs) that express the target of the immunology agent, e.g., PD-1. In certain embodiments, the subject to be treated has a tumor that expresses CD73 on the tumor cells and the target of the immuno-oncology agent, e.g., PD-1 or PD-L1, on TILs. In certain embodiments, the cancer or tumor is selected from the group of lung adenocarcinoma, thyroid carcinoma, pancreatic adenocarcinoma, endometrial carcinoma, colon adenocarcinoma, lung squamous cell carcinoma, head and neck squamous cell carcinoma, and ovarian adenocarcinoma.

[0009] Also provided herein are methods of determining whether a subject with cancer would respond to treatment with an anti-CD73 antagonist, comprising determining the level of CD73 in a tumor of the subject, wherein the presence of CD73 in the tumor indicates the subject is likely to respond to a treatment with an anti-CD73 antagonist.

[0010] Also provided herein are methods of determining whether a subject having cancer would respond to a treatment with an anti-CD73 antagonist and a immune-oncology agent, comprising determining the level of CD73 in a tumor and the level of the target of the immuno-oncology agent (e.g., a checkpoint inhibitor or co-stimulatory protein) in TILs of the tumor in the subject, wherein the presence of CD73 in the tumor and the presence of the target of the immuno-oncology agent in TILs indicates that the subject is likely to respond to treatment with an anti-CD73 antagonist and the immuno-oncology agent.

[0011] In certain embodiments, the level of immuno-oncology target in TILs is measured by determining the level of the immuno-oncology target on CD8+ T cells, CD4+ FoxP3− T cells, or CD4+ FoxP3+ T cells, and if the immuno-oncology target expression is detected on one or more of these cells types, then the subject is likely to respond to a treatment with an anti-CD73 antagonist and the immuno-oncology agent.

[0012] Also provided herein are methods of determining whether a subject having cancer would respond to a treatment with an anti-CD73 antagonist and a PD-1 antagonist, comprising determining the level of CD73 in a tumor and the level of PD-1 in tumor infiltrating lymphocytes (TILs) of the tumor in the subject, wherein the presence of CD73 in the tumor and the presence of PD-1 in TILs indicates the subject is likely to respond to treatment with an anti-CD73 antagonist and anti-PD-1 antagonist.

[0013] In certain embodiments, the level of PD-1 in TILs is measured by determining the level of PD-1 on CD8+ T cells, CD4+ FoxP3− T cells, or CD4+ FoxP3+ T cells, and if PD-1 expression is detected on one or more of these cells types, then the subject is likely to respond to a treatment with an anti-CD73 antagonist and anti-PD-1 antagonist.

[0014] Also provided herein are methods for determining human CD73 receptor occupancy by an anti-human CD73 antibody in blood cells of a subject, comprising obtaining a whole blood sample from a subject, and conducting flow cytometry using an anti-human IgG1 Fc antibody and a marker of T and/or B cells. In certain embodiments, flow cytometry is a direct detection assay. In certain embodiments, the marker of T and/or B cells is a marker of CD8⁺ T cells or a marker of B19⁺ B cells. In certain embodiments, flow cytometry is conducted within 48 hours of obtaining the blood sample from the subject. In certain embodiments, the anti-human IgG1 Fc antibody is IS1112E.E.23.30.

[0015] In certain embodiments, a method for determining human CD73 receptor occupancy by an anti-human CD73 antibody in blood cells of a subject comprises obtaining a whole blood sample from a subject, and conducting flow cytometry using an anti-human IgG1 Fc antibody and a marker of CD8⁺ T cells and/or B19⁺ B cells, and wherein the flow cytometry is conducted within 48 hours of obtaining the blood sample from the subject.

[0016] Provided herein are combination treatments for cancer, such as the combined administration of an anti-CD73 antagonist and an immuno-oncology agent. In certain embodiments, the CD73 antagonist for use in the methods described herein is an anti-CD73 antibody or antigen binding portion thereof. In certain embodiments, the immuno-oncology agent is selected from the group consisting of a PD-1 antagonist, a PD-L1 antagonist, a CTLA-4 antagonist, a LAG-3 antagonist, or others described herein. In certain embodiments, the immuno-oncology agent is an antibody or antigen binding portion thereof, such as an anti-PD-1 antibody (e.g., an anti-PD-1 antibody comprising a heavy chain variable region CDR1, CDR2, and CDR3 comprising the sequences set forth in SEQ ID NOs: 383-385, respectively, and light chain variable region CDR1, CDR2, and CDR3 comprising the sequences set forth in SEQ ID NOs: 386-388, respectively, or comprising heavy and light chain variable regions sequences set forth in SEQ ID NOs: 381 and 382, respectively). An exemplary anti-PD-1 antibody that can be administered with an anti-CD73 antibody is nivolumab (OPDIVO®; BMS-936558).

[0017] In certain embodiments, the anti-CD73 antibody or antigen-binding portion thereof for use in the methods described herein exhibits one or more of the following properties: (1) binding to human CD73, e.g., bead bound human dimeric human CD73 isoform 1 and 2, e.g., with a K_{D} of 10 nM or less (e.g., 0.01 nM to 10 nM), e.g., as measured by BIACORE® SPR analysis; (2) binding to membrane bound human CD73, e.g., with an EC₅₀ of 1 nM or less (e.g., 0.01 nM to 1 nM); (3) binding to cynomolgus CD73, e.g., binding to membrane bound cynomolgus CD73, e.g, with an EC₅₀ of 10 nM or less (e.g., 0.01 nM to 10 nM); (4) inhibition of human CD73 enzymatic activity, e.g., with an EC50 of 10 nM or less; (5) inhibition of cyno CD73 enzymatic activity, e.g., with an EC50 of 10 nM or less; (6) inhibition of endogenous (cellular) human CD73 enzymatic activity in Calu6 cells with an EC50 of 10 nM or less; (7) inhibition of human CD73 enzymatic activity in vivo; (8) internalization, e.g., antibody mediated (or dependent) CD73 internalization, into cells, e.g., with a T_{1/2} of less than 1 hour, 30 minutes or 10 minutes and/or a Ymax of at least 70%, 80% or 90%; (9) binding to a conformational epitope on human CD73, e.g., a discontinuous epitope within the amino acid sequence (SEQ ID NO: 1) which includes all or a portion of amino acid residues FTKVQQIRRAEPNVLLLDA (SEQ ID NO: 96) and/or LYLPYKVLPVGDEVVG (SEQ ID NO: 97); (10) competing in either direction or both directions for binding to human CD73 with CD73.4-1, CD73.4-2, CD73.3, 11F11-1, 11F11-2, 4C3-1, 4C3-2, 4C3-3, 4D4, 10D2-1, 10D2-2, 11A6, 24H2, 5F8-1, 5F8-2, 6E11 and/or 7A11; and (11) interacting with human CD73 in a similar pattern as CD73.4, as determined by X-ray crystallography.

[0018] In certain embodiments, the anti-CD73 antibody or antigen-binding portion thereof comprises heavy and light chain variable regions which are at least 85%, at least 90%, at least 95%, at least 98%, or 100% identical to the heavy and light chain variable region amino acid sequences, respectively selected from the group consisting of: (a) SEQ ID NOs: 4 and 8; (b) SEQ ID NOs: 4 and 12; (c) SEQ ID NOs: 16 and 20; (d) SEQ ID NOs: 16 and 24; (e) SEQ ID NOs: 16 and 28; (f) SEQ ID NOs: 32 and 36; (g) SEQ ID NOs: 40 and 44; (h) SEQ ID NOs: 40 and 48; (i) SEQ ID NOs: 52 and 56; (j) SEQ ID NOs: 60 and 64; (k) SEQ ID NOs: 68 and 72; (1) SEQ ID NOs: 68 and 76; (m) SEQ ID NOs: 80 and 84; (n) SEQ ID NOs: 88 and 92; (o) SEQ ID NOs: 135 and 8; and (p) SEQ ID NOs: 135 and 12.

[0019] In certain embodiments, the anti-CD73 antibody or antigen-binding portion thereof comprises: (a) heavy chain CDR1, CDR2, and CDR3 sequences comprising SEQ ID NOs: 5, 6, and 7, respectively, and light chain CDR1, CDR2, and CDR3 sequences comprising SEQ ID NOs: 9, 10, and 11, respectively; (b) heavy chain CDR1, CDR2, and CDR3 sequences comprising SEQ ID NOs: 5, 6, and 7, respectively, and light chain CDR1, CDR2, and CDR3 sequences comprising SEQ ID NOs: 13, 14, and 15, respectively; (c) heavy chain CDR1, CDR2, and CDR3 sequences comprising SEQ ID NOs: 17, 18, and 19, respectively, and light chain CDR1, CDR2, and CDR3 sequences comprising SEQ ID NOs: 21, 22, and 23, respectively; (d) heavy chain CDR1, CDR2, and CDR3 sequences comprising SEQ ID NOs: 17, 18, and 19, respectively, and light chain CDR1, CDR2, and CDR3 sequences comprising SEQ ID NOs: 25, 26, and 27, respectively; (e) heavy chain CDR1, CDR2, and CDR3 sequences comprising SEQ ID NOs: 17, 18, and 19, respectively, and light chain CDR1, CDR2, and CDR3 sequences comprising SEQ ID NOs: 29, 30, and 31, respectively; (f) heavy chain CDR1, CDR2, and CDR3 sequences comprising SEQ ID NOs: 33, 34, and 35, respectively, and light chain CDR1, CDR2, and CDR3 sequences comprising SEQ ID NOs: 37, 38, and 39, respectively; (g) heavy chain CDR1, CDR2, and CDR3 sequences comprising SEQ ID NOs: 41, 42, and 43, respectively, and light chain CDR1, CDR2, and CDR3 sequences comprising SEQ ID NOs: 45, 46, and 47, respectively; (h) heavy chain CDR1, CDR2, and CDR3 sequences comprising SEQ ID NOs: 41, 42, and 43, respectively, and light chain CDR1, CDR2, and CDR3 sequences comprising SEQ ID NOs: 49, 50, and 51, respectively; (i) heavy chain CDR1, CDR2, and CDR3 sequences comprising SEQ ID NOs: 53, 54, and 55, respectively, and light chain CDR1, CDR2, and CDR3 sequences comprising SEQ ID NOs: 57, 58, and 59, respectively; (j) heavy chain CDR1, CDR2, and CDR3 sequences comprising SEQ ID NOs: 61, 62, and 63, respectively, and light chain CDR1, CDR2, and CDR3 sequences comprising SEQ ID NOs: 65, 66, and 67, respectively; (k) heavy chain CDR1, CDR2, and CDR3 sequences comprising SEQ ID NOs: 69, 70, and 71, respectively, and light chain CDR1, CDR2, and CDR3 sequences comprising SEQ ID NOs: 73, 74, and 75, respectively; (1) heavy chain CDR1, CDR2, and CDR3 sequences comprising SEQ ID NOs: 69, 70, and 71, respectively, and light chain CDR1, CDR2, and CDR3 sequences comprising SEQ ID NOs: 77, 78, and 79, respectively; (m) heavy chain CDR1, CDR2, and CDR3 sequences comprising SEQ ID NOs: 81, 82, and 83, respectively, and light chain CDR1, CDR2, and CDR3 sequences comprising SEQ ID NOs: 85, 86, and 87, respectively; or (n) heavy chain CDR1, CDR2, and CDR3 sequences comprising SEQ ID NOs: 89, 90, and 91, respectively, and light chain CDR1, CDR2, and CDR3 sequences comprising SEQ ID NOs: 93, 94, and 95, respectively.

[0020] In certain embodiments, the anti-CD73 antibody or antigen binding portion thereof comprises heavy chain and light chain sequences which are at least 80%, 85%, 90%, 95%, 96%, 97%, 98%, 99%, or 100% identical to the amino acid sequences of the heavy and light chain sequences, respectively, selected from the group consisting of: (a) SEQ ID NOs: 100 and 101, respectively; (b) SEQ ID NOs: 100 and 102, respectively; (c) SEQ ID NOs: 103 and 104, respectively; (d) SEQ ID NOs: 103 and 105, respectively; (e) SEQ ID NOs: 103 and 106, respectively; (f) SEQ ID NOs: 107 and 108, respectively; (g) SEQ ID NOs: 109 and 110, respectively; (h) SEQ ID NOs: 109 and 111, respectively; (i) SEQ ID NOs: 112 and 113, respectively; (j) SEQ ID NOs: 114 and 115, respectively; (k) SEQ ID NOs: 116 and 117, respectively; (1) SEQ ID NOs: 116 and 118, respectively; (m) SEQ ID NOs: 119 and 120, respectively; (n) SEQ ID NOs: 121 and 122, respectively; (o) SEQ ID NOs: 133 and 101, respectively; and (p) SEQ ID NOs: 133 and 102, respectively.

[0021] In certain embodiments, the anti-CD73 antibody comprises an effectorless Fc. In certain embodiments, the anti-CD73 antibody is selected from the group consisting of an IgG1, an IgG2, an IgG3, an IgG4 or a variant thereof.

[0022] In certain embodiments, the anti-CD73 antibody comprises a modified heavy chain constant region, comprising a human CH1 domain, a human hinge domain, a human CH2 domain, and a human CH3 domain in order from N- to C-terminus. In certain embodiments, the modified constant region comprises at least 2 domains of different isotypes selected from the group of isotypes consisting of IgG1, IgG2, IgG3, and IgG4. In certain embodiments, the modified constant region comprises a human IgG2 CH1 domain and at least one of the CH2, CH3, and hinge domains is not an IgG2 isotype. In certain embodiments, the IgG2 CH1 domain comprises the amino acid sequence of SEQ ID NO: 124. In certain embodiments, the modified constant region comprises a human IgG2 hinge domain which, e.g., reduces heterogeneity in the cysteine binding. In certain embodiments, the hinge domain comprises amino acid substitution at C219 or C220, relative to a wildtype human IgG2 hinge domain (SEQ NO 136). In certain embodiments, the hinge domain comprises the amino acid sequence of SEQ ID NO: 123. In certain embodiments, the modified constant region comprises a human IgG1 CH2 domain which reduces or eliminates effector functions. In certain embodiments, the CH2 domain comprises amino acid substitutions A330S and P331S, relative to a wildtype human IgG1 CH2 domain (SEQ ID NO: 137), or comprises the amino acid sequence of SEQ ID NO: 125. In certain embodiments, the modified constant region comprises a human IgG1 CH3 domain, such as the amino acid sequence of SEQ ID NO: 128.

[0023] In certain embodiments, the anti-CD73 antibody, or antigen binding portion thereof, is a human or humanized antibody.

[0024] In certain embodiments, methionine residues in the CDR regions of the anti-CD73 antibody are replaced with amino acid residues that do not undergo oxidation.

[0025] In certain embodiments, the anti-CD73 antibody and immuno-oncology agent are formulated for intravenous administration. In certain embodiments, the anti-CD73 antibody and immuno-oncology agent are formulated separately. In certain embodiments, the anti-CD73 antibody is administered prior to administration of the immuno-oncology agent. In certain embodiments, the anti-CD73 antibody is administered after administration of the immuno-oncology agent. In certain embodiments, the anti-CD73 antibody and immuno-oncology agent are administered concurrently.

[0026] Also provided herein are kits for treating a solid tumor in a human patient, the kit comprising: (a) a dose of an anti-CD73 antibody comprising CDR1, CDR2 and CDR3 domains of the heavy chain variable region having the sequence set forth in SEQ ID NO: 135, and CDR1, CDR2 and CDR3 domains of the light chain variable region having the sequence set forth in SEQ ID NO: 8 or 12; (b) a dose of an immuno-oncology agent, wherein the immuno-oncology agent is an anti-PD-1 antibody comprising CDR1, CDR2 and CDR3 domains of the heavy chain variable region having the sequence set forth in SEQ ID NO: 381, and CDR1, CDR2 and CDR3 domains of the light chain variable region having the sequence set forth in SEQ ID NO: 382, such as nivolumab (BMS-936558); and (c) instructions for using the anti-CD73 antibody and immuno-oncology agent in the methods described herein.

### BRIEF DESCRIPTION OF THE DRAWINGS

[0027] FIG. 1A shows the nucleotide sequence (SEQ ID NO: 237) and amino acid sequence (SEQ ID NO: 135) of the heavy chain variable region of the CD73.4-1 human monoclonal antibody. The CDR1 (SEQ ID NO: 5), CDR2 (SEQ ID NO: 6) and CDR3 (SEQ ID NO: 7) regions are delineated and the V, D and J germline derivations are indicated.

[0028] FIG. 1B shows the nucleotide sequence (SEQ ID NO: 140) and amino acid sequence (SEQ ID NO: 8) of the light chain variable region (VK1) of the CD73.4-1 human monoclonal antibody. The CDR1 (SEQ ID NO: 9), CDR2 (SEQ ID NO: 10) and CDR3 (SEQ ID NO: 11) regions are delineated and the V, D and J germline derivations are indicated.

[0029] FIG. 2A shows the nucleotide sequence (SEQ ID NO: 237) and amino acid sequence (SEQ ID NO: 135) of the heavy chain variable region of the CD73.4-2 human monoclonal antibody. The CDR1 (SEQ ID NO: 5), CDR2 (SEQ ID NO: 6) and CDR3 (SEQ ID NO: 7) regions are delineated and the V, D and J germline derivations are indicated.

[0030] FIG. 2B shows the nucleotide sequence (SEQ ID NO: 141) and amino acid sequence (SEQ ID NO: 12) of the light chain variable region of the CD73.4-2 human monoclonal antibody. The CDR1 (SEQ ID NO: 13), CDR2 (SEQ ID NO: 14) and CDR3 (SEQ ID NO: 15) regions are delineated and the V, D and J germline derivations are indicated.

[0031] FIG. 3A shows the nucleotide sequence (SEQ ID NO: 139) and amino acid sequence (SEQ ID NO: 4) of the heavy chain variable region of the 11F11-1 human monoclonal antibody. The CDR1 (SEQ ID NO: 5), CDR2 (SEQ ID NO: 6) and CDR3 (SEQ ID NO: 7) regions are delineated and the V, D and J germline derivations are indicated.

[0032] FIG. 3B shows the nucleotide sequence (SEQ ID NO: 140) and amino acid sequence (SEQ ID NO: 8) of the light chain variable region of the 11F11-1 human monoclonal antibody. The CDR1 (SEQ ID NO: 9), CDR2 (SEQ ID NO: 10) and CDR3 (SEQ ID NO: 11) regions are delineated and the V, D and J germline derivations are indicated.

[0033] FIG. 4A shows the nucleotide sequence (SEQ ID NO: 139) and amino acid sequence (SEQ ID NO: 4) of the heavy chain variable region of the 11F11-2 human monoclonal antibody. The CDR1 (SEQ ID NO: 5), CDR2 (SEQ ID NO: 6) and CDR3 (SEQ ID NO: 7) regions are delineated and the V, D and J germline derivations are indicated.

[0034] FIG. 4B shows the nucleotide sequence (SEQ ID NO: 141) and amino acid sequence (SEQ ID NO: 12) of the light chain variable region of the 11F11-2 human monoclonal antibody. The CDR1 (SEQ ID NO: 13), CDR2 (SEQ ID NO: 14) and CDR3 (SEQ ID NO: 15) regions are delineated and the V, D and J germline derivations are indicated.

[0035] FIG. 5A shows the nucleotide sequence (SEQ ID NO: 142) and amino acid sequence (SEQ ID NO: 16) of the heavy chain variable region of the 4C3-1 human monoclonal antibody. The CDR1 (SEQ ID NO: 17), CDR2 (SEQ ID NO: 18) and CDR3 (SEQ ID NO: 19) regions are delineated and the V, D and J germline derivations are indicated.

[0036] FIG. 5B shows the nucleotide sequence (SEQ ID NO: 143) and amino acid sequence (SEQ ID NO: 20) of the light chain variable region of the 4C3-1 human monoclonal antibody. The CDR1 (SEQ ID NO: 21), CDR2 (SEQ ID NO: 22) and CDR3 (SEQ ID NO: 23) regions are delineated and the V, D and J germline derivations are indicated.

[0037] FIG. 6A shows the nucleotide sequence (SEQ ID NO: 142) and amino acid sequence (SEQ ID NO: 16) of the heavy chain variable region of the 4C3-2 human monoclonal antibody. The CDR1 (SEQ ID NO: 17), CDR2 (SEQ ID NO: 18) and CDR3 (SEQ ID NO: 19) regions are delineated and the V, D and J germline derivations are indicated.

[0038] FIG. 6B shows the nucleotide sequence (SEQ ID NO: 144) and amino acid sequence (SEQ ID NO: 24) of the light chain variable region of the 4C3-2 human monoclonal antibody. The CDR1 (SEQ ID NO: 25), CDR2 (SEQ ID NO: 26) and CDR3 (SEQ ID NO: 27) regions are delineated and the V, D and J germline derivations are indicated.

[0039] FIG. 7A shows the nucleotide sequence (SEQ ID NO: 142) and amino acid sequence (SEQ ID NO: 16) of the heavy chain variable region of the 4C3-3 human monoclonal antibody. The CDR1 (SEQ ID NO: 17), CDR2 (SEQ ID NO: 18) and CDR3 (SEQ ID NO: 19) regions are delineated and the V, D and J germline derivations are indicated.

[0040] FIG. 7B shows the nucleotide sequence (SEQ ID NO: 145) and amino acid sequence (SEQ ID NO: 28) of the light chain variable region of the 4C3-3 human monoclonal antibody. The CDR1 (SEQ ID NO: 29), CDR2 (SEQ ID NO: 30) and CDR3 (SEQ ID NO: 31) regions are delineated and the V, D and J germline derivations are indicated.

[0041] FIG. 8A shows the nucleotide sequence (SEQ ID NO: 146) and amino acid sequence (SEQ ID NO: 32) of the heavy chain variable region of the 4D4-1 human monoclonal antibody. The CDR1 (SEQ ID NO: 33), CDR2 (SEQ ID NO: 34) and CDR3 (SEQ ID NO: 35) regions are delineated and the V, D and J germline derivations are indicated.

[0042] FIG. 8B shows the nucleotide sequence (SEQ ID NO: 147) and amino acid sequence (SEQ ID NO: 36) of the light chain variable region of the 4D4-1 human monoclonal antibody. The CDR1 (SEQ ID NO: 37), CDR2 (SEQ ID NO: 38) and CDR3 (SEQ ID NO: 39) regions are delineated and the V, D and J germline derivations are indicated.

[0043] FIG. 9A shows the nucleotide sequence (SEQ ID NO: 148) and amino acid sequence (SEQ ID NO: 40) of the heavy chain variable region of the 10D2-1 human monoclonal antibody. The CDR1 (SEQ ID NO: 41), CDR2 (SEQ ID NO: 42) and CDR3 (SEQ ID NO: 43) regions are delineated and the V, D and J germline derivations are indicated.

[0044] FIG. 9B shows the nucleotide sequence (SEQ ID NO: 149) and amino acid sequence (SEQ ID NO: 44) of the light chain variable region of the 10D2-1 human monoclonal antibody. The CDR1 (SEQ ID NO: 45), CDR2 (SEQ ID NO: 46) and CDR3 (SEQ ID NO: 47) regions are delineated and the V, D and J germline derivations are indicated.

[0045] FIG. 10A shows the nucleotide sequence (SEQ ID NO: 148) and amino acid sequence (SEQ ID NO: 40) of the heavy chain variable region of the 10D2-2 human monoclonal antibody. The CDR1 (SEQ ID NO: 41), CDR2 (SEQ ID NO: 42) and CDR3 (SEQ ID NO: 43) regions are delineated and the V, D and J germline derivations are indicated.

[0046] FIG. 10B shows the nucleotide sequence (SEQ ID NO: 150) and amino acid sequence (SEQ ID NO: 48) of the light chain variable region of the 10D2-2 human monoclonal antibody. The CDR1 (SEQ ID NO: 49), CDR2 (SEQ ID NO: 50) and CDR3 (SEQ ID NO: 51) regions are delineated and the V, D and J germline derivations are indicated.

[0047] FIG. 11A shows the nucleotide sequence (SEQ ID NO: 151) and amino acid sequence (SEQ ID NO: 52) of the heavy chain variable region of the 11A6-1 human monoclonal antibody. The CDR1 (SEQ ID NO: 53), CDR2 (SEQ ID NO: 54) and CDR3 (SEQ ID NO: 55) regions are delineated and the V, D and J germline derivations are indicated.

[0048] FIG. 11B shows the nucleotide sequence (SEQ ID NO: 152) and amino acid sequence (SEQ ID NO: 56) of the light chain variable region of the 11A6-1 human monoclonal antibody. The CDR1 (SEQ ID NO: 57), CDR2 (SEQ ID NO: 58) and CDR3 (SEQ ID NO: 59) regions are delineated and the V, D and J germline derivations are indicated.

[0049] FIG. 12A shows the nucleotide sequence (SEQ ID NO: 153) and amino acid sequence (SEQ ID NO: 60) of the heavy chain variable region of the 24H2-1 human monoclonal antibody. The CDR1 (SEQ ID NO: 61), CDR2 (SEQ ID NO: 62) and CDR3 (SEQ ID NO: 63) regions are delineated and the V, D and J germline derivations are indicated.

[0050] FIG. 12B shows the nucleotide sequence (SEQ ID NO: 154) and amino acid sequence (SEQ ID NO: 64) of the light chain variable region of the 24H2-1 human monoclonal antibody. The CDR1 (SEQ ID NO: 65), CDR2 (SEQ ID NO: 66) and CDR3 (SEQ ID NO: 67) regions are delineated and the V, D and J germline derivations are indicated.

[0051] FIG. 13A shows the nucleotide sequence (SEQ ID NO: 155) and amino acid sequence (SEQ ID NO: 68) of the heavy chain variable region of the 5F8-1 human monoclonal antibody. The CDR1 (SEQ ID NO: 69), CDR2 (SEQ ID NO: 70) and CDR3 (SEQ ID NO: 71) regions are delineated and the V, D and J germline derivations are indicated.

[0052] FIG. 13B shows the nucleotide sequence (SEQ ID NO: 156) and amino acid sequence (SEQ ID NO: 72) of the light chain variable region of the 5F8-1 human monoclonal antibody. The CDR1 (SEQ ID NO: 73), CDR2 (SEQ ID NO: 74) and CDR3 (SEQ ID NO: 75) regions are delineated and the V, D and J germline derivations are indicated.

[0053] FIG. 14A shows the nucleotide sequence (SEQ ID NO: 155) and amino acid sequence (SEQ ID NO: 68) of the heavy chain variable region of the 5F8-2 human monoclonal antibody. The CDR1 (SEQ ID NO: 69), CDR2 (SEQ ID NO: 70) and CDR3 (SEQ ID NO: 71) regions are delineated and the V, D and J germline derivations are indicated.

[0054] FIG. 14B shows the nucleotide sequence (SEQ ID NO: 157) and amino acid sequence (SEQ ID NO: 76) of the light chain variable region of the 5F8-2 human monoclonal antibody. The CDR1 (SEQ ID NO: 77), CDR2 (SEQ ID NO: 78) and CDR3 (SEQ ID NO: 79) regions are delineated and the V, D and J germline derivations are indicated.

[0055] FIG. 15A shows the nucleotide sequence (SEQ ID NO: 155) and amino acid sequence (SEQ ID NO: 68) of the heavy chain variable region of the 5F8-3 human monoclonal antibody. The CDR1 (SEQ ID NO: 69), CDR2 (SEQ ID NO: 70) and CDR3 (SEQ ID NO: 71) regions are delineated and the V, D and J germline derivations are indicated.

[0056] FIG. 15B shows the nucleotide sequence (SEQ ID NO: 242) and amino acid sequence (SEQ ID NO: 238) of the light chain variable region of the 5F8-3 human monoclonal antibody. The CDR1 (SEQ ID NO: 239), CDR2 (SEQ ID NO: 240) and CDR3 (SEQ ID NO: 241) regions are delineated and the V, D and J germline derivations are indicated.

[0057] FIG. 16A shows the nucleotide sequence (SEQ ID NO: 158) and amino acid sequence (SEQ ID NO: 80) of the heavy chain variable region of the 6E11-1 human monoclonal antibody. The CDR1 (SEQ ID NO: 81), CDR2 (SEQ ID NO: 82) and CDR3 (SEQ ID NO: 83) regions are delineated and the V, D and J germline derivations are indicated.

[0058] FIG. 16B shows the nucleotide sequence (SEQ ID NO: 159) and amino acid sequence (SEQ ID NO: 84) of the light chain variable region of the 6E11-1 human monoclonal antibody. The CDR1 (SEQ ID NO: 85), CDR2 (SEQ ID NO: 86) and CDR3 (SEQ ID NO: 87) regions are delineated and the V, D and J germline derivations are indicated.

[0059] FIG. 17A shows the nucleotide sequence (SEQ ID NO: 160) and amino acid sequence (SEQ ID NO: 88) of the heavy chain variable region of the 7A11-1 human monoclonal antibody. The CDR1 (SEQ ID NO: 89), CDR2 (SEQ ID NO: 90) and CDR3 (SEQ ID NO: 91) regions are delineated and the V, D and J germline derivations are indicated.

[0060] FIG. 17B shows the nucleotide sequence (SEQ ID NO: 161) and amino acid sequence (SEQ ID NO: 92) of the light chain variable region of the 7A11-1 human monoclonal antibody. The CDR1 (SEQ ID NO: 93), CDR2 (SEQ ID NO: 94) and CDR3 (SEQ ID NO: 95) regions are delineated and the V, D and J germline derivations are indicated.

[0061] FIG. 18 shows the amino acid sequence (SEQ ID NO: 189) of the heavy chain of anti-CD73 antibody CD73.4-IgG2CS-IgG1.1f, and its variable region, CDRs 1, 2 and 3, CH1, Hinge, CH2 and CH3 domains.

[0062] FIG. 19 shows SPR sensorgram data for the binding of 600, 200, 66.7, 22.2, 7.4, and 2.5 nM human-CD73-his (thick lines) or cyno-CD73-his (thin lines) to CD73.4-IgG2-C219S-IgG1.1f captured on an immobilized protein A surface at 25° C.

[0063] FIGS. 20A1 and 20A2 show the binding of the 11F11, CD73.4 and CD73.10 antibodies with the indicated heavy chain constant regions to human CD73 positive Calu6 cells (human pulmonary adenocarcinoma cell line).

[0064] FIGS. 20B1 and 20B2 show the binding of the 11F11, CD73.4 and CD73.10 antibodies with the indicated heavy chain constant regions to human CD73 negative DMS114 cells (small lung cell carcinoma cell line).

[0065] FIGS. 20C1 and 20C2 show the binding of the 11F11, CD73.4 and CD73.10 antibodies with the indicated heavy chain constant regions to cyno CD73 positive CHO cells.

[0066] FIGS. 20D1 and 20D2 show the binding of the 11F11, CD73.4 and CD73.10 antibodies with the indicated heavy chain constant regions to cyno CD73 negative CHO-K1 cells.

[0067] FIG. 20E shows the binding of the indicated antibodies to T cells from donors D1 and D2.

[0068] FIG. 20F shows the binding of the indicated antibodies to T cells from donors D1 and D2.

[0069] FIG. 20G shows binding of ¹²⁵-I-Labeled CD73.4-IgG2-C219S-IgG1.1f to Human B Cells.

[0070] FIG. 20H shows binding of ¹²⁵-I-Labeled CD73.4-IgG2-C219S-IgG1.1f to Human Calu-6 Cells.

[0071] FIG. 20I shows binding of ¹²⁵-I-Labeled CD73.4-IgG2-C219S-IgG1.1f to CHO-Cynomolgus CD73 Cells.

[0072] FIGS. 21A1 and 21A2 show the inhibition of bead bound human CD73 enzymatic activity by the anti-CD73 antibodies 11F11, CD73.4 and CD73.10 with the indicated heavy chain constant regions. All antibodies inhibited human CD73 enzymatic activity.

[0073] FIGS. 21B1 and 21B2 show the inhibition of bead bound cyno CD73 enzymatic activity by the anti-CD73 antibodies 11F11, CD73.4 and CD73.10 with the indicated heavy chain constant regions. All antibodies inhibited cyno CD73 enzymatic activity.

[0074] FIGS. 22A1 and 22A2 show CD73 enzymatic inhibition in human CD73 positive Calu6 cells by the 11F11, CD73.4 and CD73.10 antibodies with the indicated heavy chain constant regions. All antibodies inhibited CD73 enzymatic activity in these cells.

[0075] FIGS. 22B1 and 22B2 show CD73 enzymatic inhibition in human CD73 negative DMS-114 cells by the 11F11, CD73.4 and CD73.10 antibodies with the indicated heavy chain constant regions.

[0076] FIG. 22C shows EC50 and Ymax values of inhibition of endogenous CD73 activity by 11F11 and 11F11 F(ab′)₂ fragments, as determined in cAMP assay using Calu-6 and HEK/A2R cells. FIG. 22C also shows the EC50 and Ymax values of 11F11 and 11F11 F(ab′)2 fragments in a Calu-6 internalization assay. The Figure shows that an 11F11 Fab fragment is inactive in these two assays.

[0077] FIG. 22D shows a time course of adenosine production from Calu6 cells treated with the 11F11 or 4C3 antibody, as measured by LC/MS/MS, indicating that CD73 enzymatic inhibition by the 11F11 antibody occurs faster than that by the 4C3 antibody.

[0078] FIG. 22E shows the quantification of CD73 enzymatic activity in Calu-6 tumors treated with CD73.4-IgG2C219S.IgG1.1f at the indicated doses or control antibody.

[0079] FIG. 23A shows the kinetics of antibody mediated internalization of CD73 by the following antibodies: 11F11, 4C3, 6D11, CD73.3-IgG1.1f with the 4C3Vk1 light chain (“3-Vh-hHC-IgG1.1f/4C3Vk1”), CD73.4-IgG2CS with the 11F11 Vk2 light chain (“4-Vh-hHC-IgG2-C219S/11F11-Vk2”), CD73.10-IgG2CS (“CD73.10-Vh-hHC-IgG2-C219S”), CD73.10-IgG2CS-IgG1.1f (“CD73.10-Vh-hHC-IgG2-C219S-IgG1.1f”), and CD73.10-IgG1.1f (“CD73.10-Vh-hHC-IgG1.1f”) antibodies in H2228 cells. The 11F11 (which is of an IgG2 isotype), CD73.4-IgG2CS, CD73.10-IgG2CS and CD73.10-IgG2CS-IgG1.1f antibodies are internalized faster and to a higher degree than the other tested antibodies, which are of an IgG1 isotype.

[0080] FIG. 23B shows the kinetics of antibody mediated CD73 internalization of the same antibodies as those shown in FIG. 23A in HCC15 cells (non-small cell lung carcinoma cell line), showing similar results to those obtained in H2228 cells (non-small cell lung carcinoma cell line).

[0081] FIG. 23C shows the kinetics of antibody mediated CD73 internalization of the same antibodies as those shown in FIGS. 23A and 23B, as well as CD73.11-IgG2CS (“11-Vh-hVC-IgG2-C219S”), in Calu6 cells, showing similar results to those obtained in H2228 and HCC15 cells.

[0082] FIG. 23D shows the kinetics of antibody mediated CD73 internalization of the same antibodies as those shown in FIG. 23C in NCI-2030 cells (non-small cell lung carcinoma cell line), showing similar results to those obtained in H2228, HCC15, and Calu6 cells.

[0083] FIG. 23E shows the kinetics of antibody mediated CD73 internalization of the indicated antibodies in Calu6 cells, as measured by flow cytometry.

[0084] FIG. 23F shows the kinetics of antibody mediated CD73 internalization of the indicated antibodies in NCI-H292 cells (mucoepidermoid pulmonary carcinoma cell line), as measured by flow cytometry, but where the antibodies were not washed out after the first incubation of the cells with the antibodies.

[0085] FIG. 23G shows the percentage of CD73 internalized in Calu6 cells treated with the indicated antibodies, showing antibody mediated CD73 internalization of the indicated antibodies in Calu6 cells over time.

[0086] FIG. 23H shows the percentage of CD73 internalized in NCI-H292 cells treated with the indicated antibodies over time, showing antibody mediated CD73 internalization of the indicated antibodies in NCI-H292 cells over time.

[0087] FIG. 23I shows the percentage of CD73 internalized in SNU-C1 cells (colon carcinoma cell line) treated with the indicated antibodies over time, showing antibody mediated CD73 internalization of the indicated antibodies in SNU-C1 cells over time.

[0088] FIG. 23J shows the percentage of CD73 internalized in NCI-H1437 cells (non-small cell lung carcinoma cell line) treated with the indicated antibodies over time, showing antibody mediated CD73 internalization of the indicated antibodies in NCI-H1437 cells over time.

[0089] FIG. 23K shows the percentage of CD73 internalized in Calu6 cells treated with the indicated antibodies over time, showing antibody mediated CD73 internalization of the indicated antibodies in Calu6 cells over time.

[0090] FIG. 23L shows the percentage of CD73 internalized in NCI-H292 cells treated with the indicated antibodies over time, showing antibody mediated CD73 internalization of the indicated antibodies in Calu6 cells over time.

[0091] FIG. 23M shows the level of CD73 on the surface of Calu6 cells treated with 5 μg/ml of the indicated antibodies for 0, 5, 15 or 30 minutes.

[0092] FIG. 24A shows xenograft tumor sections from animals harvested 4 days after treatment of the animals with a control antibody and stained for CD73 enzymatic activity. The sections show a dense brown color, indicating CD73 enzymatic activity.

[0093] FIG. 24B shows xenograft tumor sections from animals harvested 1 day after treatment of the animals with the 11F11 antibody and stained for CD73 enzymatic activity. The sections show significantly less brown color relative to the control tumor sections shown in FIG. 24A, indicating in vivo inhibition of CD73 enzymatic activity by CD73.10-IgG2CS-IgG1.1f as early as 1 day after the start of the treatment.

[0094] FIG. 24C shows xenograft tumor sections from animals harvested 2 days after treatment of the animals with CD73.10-IgG2CS-IgG1.1f and stained for CD73 enzymatic activity. The sections show significantly less brown color relative to the control tumor sections shown in FIG. 24A and relative to the tumor sections after 1 day of treatment of the animals with CD73.10-IgG2CS-IgG1.1f, indicating in vivo inhibition of CD73 enzymatic activity by CD73.10-IgG2CS-IgG1.1f at least 2 days after the start of the treatment.

[0095] FIG. 24D shows xenograft tumor sections from animals harvested 3 days after treatment of the animals with CD73.10-IgG2CS-IgG1.1f and stained for CD73 enzymatic activity. The sections show significantly less brown color relative to the control tumor sections shown in FIG. 24A, indicating in vivo inhibition of CD73 enzymatic activity by CD73.10-IgG2CS-IgG1.1f at least 3 days after the start of the treatment.

[0096] FIG. 24E shows xenograft tumor sections from animals harvested 7 days after treatment of the animals with CD73.10-IgG2CS-IgG1.1f and stained for CD73 enzymatic activity. The sections show significantly less brown color relative to the control tumor sections shown in FIG. 24A, indicating in vivo inhibition of CD73 enzymatic activity by CD73.10-IgG2CS-IgG1.1f at least 7 days after the start of the treatment.

[0097] FIG. 24F shows a time course of the enzymatic activity of human CD73 in SNUC1 tumors in xenograft mice treated with a control (non CD73) antibody or with 1 mg/kg, 3 mg/kg or 10 mg/kg CD73.4-IgG2CS-IgG1.1f, showing that the anti-CD73 antibody efficiently reduces CD73 enzymatic activity in the tumors of the xenograft mice.

[0098] FIG. 24G shows the level of inhibition of CD73 in MC38 tumors of mice treated with anti-mouse CD73 antibody at 10 mg/kg, 20 mg/kg, or 30 mg/kg at different times after antibody administration.

[0099] FIG. 25A shows levels of mouse CD73 enzymatic activity in control tumor sections from Balb/c mice bearing syngeneic 4T1 tumors and control mIgG.

[0100] FIG. 25B shows tumor sections (4T1 days 1-7) of Balb/c mice bearing syngeneic 4T1 tumors subcutaneously treated with anti-mouse CD73 antibody TY23, showing that TY23 inhibits CD73 enzymatic inhibition in vivo.

[0101] FIG. 26A shows the level of cross-blocking of 4C3 by the anti-CD73 antibodies 4C3, 7A11, 6E11, 5F8, 4C3, 11F11 and 11A6 as determined by flow cytometry.

[0102] FIG. 26B shows the level of cross-blocking of 11F11 by the anti-CD73 antibodies 4C3, 7A11, 6E11, 5F8, 4C3, 11F11 and 11A6 as determined by flow cytometry.

[0103] FIG. 27A shows the amino acid sequence (SEQ ID NO: 283) of human CD73 and the regions of interaction with CD73.4-IgG2CS-IgG1.1f, which are represented in a darker grey. The stronger the interaction, the darker the grey.

[0104] FIG. 27B shows a model of the interaction between a dimeric human CD73 protein and CD73.4-IgG2CS-IgG1.1f.

[0105] FIG. 28A shows a crystallographic model of the interaction between human CD73 and 11F11Fab′ fragment.

[0106] FIG. 28B shows a model of a composite structure of two human CD73 complexes with 11F11.

[0107] FIG. 28C shows a model of the interaction between human CD73 and 11F11 antibody.

[0108] FIG. 28D shows a model of the interaction between 11F11 and human CD73.

[0109] FIG. 29A shows SEC-MALS data for human CD73 and antibody complexes. “CD73.4-hybrid” refers to CD73.4-IgG2CS-IgG1.1f.

[0110] FIG. 29B shows DLS data for human CD73 and antibody complexes.

[0111] FIG. 30A shows SEC chromatogram data for complexes of hCD73-his with the CD73.4 antibody containing different constant regions, showing the effect of an IgG2 hinge and CH1 domain on the size of antibody/antigen complexes.

[0112] FIG. 30B shows DLS data for complexes of hCD73-his with the CD73.4 antibody containing different constant regions, showing the effect of an IgG2 hinge and CH1 domain on the size of antibody/antigen complexes.

[0113] FIG. 30C shows MALS data for complexes of hCD73-his with the CD73.4 antibody containing different constant regions, showing the effect of an IgG2 hinge and CH1 domain on the size of antibody/antigen complexes.

[0114] FIG. 30D shows a schematic model of the hCD73-his/mAb complexes derived from the MALS-determined masses in FIG. 30C.

[0115] FIG. 30E shows that higher order complexes are impacted by the CH1 region. The histograms show the % area under peaks 1 and 2, shown in the graph, for each construct.

[0116] FIG. 31 shows the percentage of antibody mediated CD73 internalization at 1, 4 or 21 hours after the addition of each of the shown antibodies. The bars for each antibody are shown in the order of 21 hours (on the left), 4 hours (middle) and 1 hour (right).

[0117] FIG. 32A shows an overlay of SEC chromatogram data for 1:1 molar complexes of hCD73-his with 16 different CD73.4 antibodies containing different constant region sequences.

[0118] FIG. 32B shows an expansion of the chromatogram data from 11-19.5 min of the chromatogram of FIG. 32A, with 4 distinct elution species indicated.

[0119] FIG. 32C shows the percentage of the UV chromatogram signal area for peak 2 of FIG. 32B, plotted for the 16 different antibody/CD73-his complexes. Data is sorted from left to right in order of increasing peak area.

[0120] FIG. 33 shows antibody binding to anti-his Fab captured FcγR-his proteins. Binding responses are plotted as a percentage of the theoretical Rmax assuming a 1:1 mAb:FcγR binding stoichiometry. The bars for each antibody are shown in the order provided by the color legends at the bottom of the slide.

[0121] FIG. 34 shows antibody binding to anti-his Fab captured FcgR-his proteins. Binding responses are plotted as a percentage of the theoretical Rmax assuming a 1:1 mAb:FcγR binding stoichiometry. The bars for each antibody are shown in the order provided by the color legends at the bottom of the slide.

[0122] FIG. 35 shows an alignment of the VH and VL sequences of various anti-CD73 antibodies. VH and VL CDR1, CDR2 and CDR3 sequences are bolded.

[0123] FIG. 36A shows EEA1 co-localization coefficients of antibodies 11F11, 6E11 and 4C3 internalized into Calu-6 cells after 0 (“4 deg”), 15, 30, 60, and 120 minutes (shown from left to right).

[0124] FIG. 36B shows Rab7 co-localization coefficients of antibodies 11F11, 6E11 and 4C3 internalized into Calu-6 cells after 0 (“4 deg”), 15, 30, 60, and 120 minutes (shown from left to right).

[0125] FIG. 36C shows Lamp-1 co-localization coefficients of antibodies 11F11, 6E11 and 4C3 internalized into Calu-6 cells after 0 (“4 deg”), 15, 30, 60, and 120 minutes (shown from left to right).

[0126] FIG. 37A shows the level of CD73 expression in the cytoplasm, cell membrane or both of the indicated tumors, as determined by immunohistochemistry (IHC) with mAb 1D7 on TMA sections. The tumors listed in the graph, from left to right, are thyroid carcinomas (n=16), pancreatic adenocarcinomas (n=10), endometrial carcinomas (n=9), hepatocellular carcinomas or combined (n=17), head & neck squamous cell carcinomas (n=15), renal cell carcinomas (n=16), colon adenocarcinomas (n=49), gastric adenocarcinomas (n=17), non-small cell lung carcinomas (n=45), ovarian adenocarcinomas (n=18), prostate adenocarcinomas (n=17), bladder carcinomas (n=20), esophageal squamous cell carcinomas (n=10), breast adenocarcinomas (n=52), and lymphomas (n=15). The first column (left) for each cancer type represents average combined tumor CD73 score; the second column (middle) for each cancer type represents average tumor cytoplasmic CD73 score; and the third column (right) for each tumor type represents the average tumor membrane CD73 score.

[0127] FIG. 37B shows the level of CD73 expression in the cell membrane of the indicated tumors. This figure corresponds to FIG. 36A, but showing only the level of CD73 on the cell membrane. The tumors listed in the graph, from left to right, are thyroid carcinomas (n=16), hepatocellular carcinomas or combined (n=17), head & neck squamous cell carcinomas (n=15), pancreatic adenocarcinomas (n=10), colon adenocarcinomas (n=49), endometrial carcinomas (n=9), non-small cell lung carcinomas (n=45), renal cell carcinomas (n=16), gastric adenocarcinomas (n=17), ovarian adenocarcinomas (n=18), prostate adenocarcinomas (n=17), bladder carcinomas (n=20), esophageal squamous cell carcinomas (n=10), lymphomas (n=15), and breast adenocarcinomas (n=52).

[0128] FIG. 38A shows CD73 expression in the cytoplasm and on the cell surface of tumors of multiple tumor types, as determined by immunohistochemistry (IHC) with mAb D7F9A on full tumor sections.

[0129] FIG. 38B shows the level of CD73 expression in the cell membrane of the indicated tumors. This figure corresponds to FIG. 37A, but showing only the level of CD73 on the cell membrane.

[0130] FIGS. 39A-39H shows CD73 expression on the cell surface of individual tumors of the tumor types shown in FIG. 38A, as determined by immunohistochemistry (IHC) on full tumor sections.

[0131] FIGS. 40A-40F show the frequency of PD-1 on CD8+ T cells, CD4+ FoxP3- and CD4+ FoxP3+ T cells in the tumors and in the blood of subjects having colon adenocarcinoma (“colon”), renal cell carcinoma (“kidney”) and lung adenocarcinoma (“lung”), as determined by flow cytometry. For each of FIGS. 40A-40F, the bars, from left to right, correspond to subjects with colon adenocarcinoma, renal cell carcinoma, and lung adenocarcinoma. FIG. 40A shows the frequency of PD-1 in CD8+ T cells in blood. FIG. 40B shows the frequency of PD-1 in CD8+ T cells in tumors. FIG. 40C shows the frequency of PD-1 in CD4+ FoxP3-cells in blood. FIG. 40D shows the frequency of PD-1 in CD4+ FoxP3-cells in tumors. FIG. 40E shows the frequency of PD-1 in CD4+ FoxP3+ cells in blood. FIG. 40F shows the frequency of PD-1 in CD4+ FoxP3+ cells in tumors.

[0132] FIGS. 41A-41D show MC38 tumor growth in mice treated with 5 mg/kg, 10 mg/kg, and 20 mg/kg of a surrogate mouse anti-CD73 antibody (mIgG1) or 10 mg/kg of a control mouse IgG1 antibody.

[0133] FIGS. 42A-42D show MC38 tumor growth in mice treated with 10 mg/kg of an anti-PD-1 antibody, or 10 mg/kg of an anti-PD-1 antibody in combination with 5 mg/kg, 10 mg/kg, or 20 mg/kg of a surrogate mouse anti-CD73 antibody (mIgG1).

[0134] FIG. 43 shows median MC38 tumor growth in mice from the experiment in FIGS. 42A-42D.

[0135] FIG. 44 shows a survival graph for mice from the experiment in FIGS. 42A-42D.

[0136] FIGS. 45A-45D show the anti-tumor effects of the combination of anti-CD73 antibody and anti-PD-1 antibody in the unstaged CT26 cancer model.

[0137] FIG. 46 shows dose dependency of three different anti-human IgG1-PE antibodies tested for use in the direct detection receptor occupancy assay format.

[0138] FIG. 47 shows dose response of a CD73 antibody from whole blood collected from normal healthy volunteers. Percent receptor occupancy of CD73 antibody described herein to CD73 on B cells with serial concentrations from three healthy donors is depicted.

[0139] FIG. 48 shows fluorescence intensity assay precision results. Whole blood from three healthy donors was spiked with CD73 antibody at various concentrations. Total receptor levels (closed symbols) and receptors bound by CD73 antibody (open symbols) are shown.

[0140] FIG. 49 shows derived receptor occupancy assay precision results. Whole blood samples from three healthy donors were spiked with CD73 antibody at various concentrations and analyzed in three replicates.

[0141] FIG. 50 shows post-collection stability of whole blood samples collected for CD73 receptor occupancy assay. Whole blood samples were treated with various concentrations of CD73 antibody and analyzed 0, 24, 48 and 72 hours post-collection.

[0142] FIG. 51 shows quality control range and performance. Total CD73 expression on CD19+B cells (top) and CD8+ T cells (bottom) of CD-Chex® Normal was analyzed five times to establish 95% confidence interval.

[0143] FIGS. 52A-52J shows the difference in type of antigen-antibody complexes formed with IgG1 and IgG2.C219S constant region containing anti-CD73 (CD73.4) antibodies. Panels A-E show selected class average for CD73+IgG1 containing anti-CD73 antibody with possible identification of segments as either antibody or the CD73 dimer (Figure A and Figure B). The diffuse branched density is the Fc domain and is often disordered in class averages, whereas the Fabs can be identified by their characteristic bimodal shape and size. The remaining density at the Fab binding sites is also bimodal and approximately 85A across, indicating it is a CD73 dimer (Figure A and Figure B). Other variations of the complex are also present in the sample and also display various conformations (C-E). Panels F-J show selected class averages for CD73 and the IgG2.C219S containing antibody with possible identification of segments as either IgG2.C219S or the CD73 dimer. The Fabs can be identified by their characteristic bimodal shape and size. The remaining density at the Fab binding sites is the CD73 dimer. The segments of the linear multimer cannot be clearly delineated but suggest how the IgG2.C219S containing antibody and CD73 form the observed string-like structures. Panels H-J show averages from manual selection of the string-like structures. The alignments appear to have centered on the Fab arms of IgG2.C219S but a more detailed interpretation is not possible. The IgG1 containing CD73.4 antibody and the IgG2.C219S containing antibody are referred to as “IgG1” and “IgG2,” respectively.

[0144] FIG. 53 shows human CD73 enzyme inhibition in patient tumor samples, as evidenced by the level of the dark (brown) stain. “Screen” refers to tumor samples prior to administration of anti-CD73 antibody to a patient, and “Post-Dosing” or “Post-Dose” refers tumor samples after administration of an anti-CD73 antibody to a patient.

[0145] FIG. 54 shows the percentage of antibody mediated CD73 internalization at 1, 4 or 21 hours after the addition of each of the shown antibodies. The bars for each antibody are shown in the order of 21 hours (on the left), 4 hours (middle) and 1 hour (right). The upper dashed line represents the average percentage internalization for antibodies having a CH1 and hinge of IgG2 and the lower dashed line represents the average percentage internalization for antibodies having a CH1 and hinge of IgG1.

[0146] FIGS. 55A and B show the percent internalization depicted in FIG. 54 as separate graphs for the 1 hour and 4 hour time points, respectively.

### DETAILED DESCRIPTION

[0147] Described herein are isolated antibodies, particularly monoclonal antibodies, e.g., human monocloncal antibodies, which specifically bind to CD73 and thereby reduce CD73 activity (“antagonist anti-CD73 antibodies”). In certain embodiments, the antibodies described herein are derived from particular heavy and light chain germline sequences and/or comprise particular structural features such as CDR regions comprising particular amino acid sequences. Provided herein are isolated antibodies, methods of making such antibodies, immunoconjugates and bispecific molecules comprising such antibodies, and pharmaceutical compositions formulated to contain the antibodies. Also provided herein are methods of using the antibodies for reducing tumor growth, alone or in combination with other therapeutic agents (e.g., antibodies) and/or cancer therapies. Accordingly, the anti-CD73 antibodies described herein may be used in a treatment in a wide variety of therapeutic applications, including, for example, inhibition of tumor growth, inhibition of metastasis, and enhancement of an immune response against a tumor.

### Definitions

[0148] In order that the present description may be more readily understood, certain terms are first defined. Additional definitions are set forth throughout the detailed description.

[0149] The term “Cluster of Differentiation 73” or “CD73” as used herein refers to an enzyme (nucleotidase) capable of converting extracellular nucleoside 5′ monophosphates to nucleosides, namely adenosine monophosphate (AMP) to adenosine. CD73 is usually found as a dimer anchored to the cell membrane through a glycosylphosphatidylinositol (GPI) linkage, has ecto-enzyme activity and plays a role in signal transduction. The primary function of CD73 is its conversion of extracellular nucleotides (e.g., 5′-AMP) to adenosine, a highly immunosuppressive molecule. Thus, ecto-5′-nucleotidase catalyzes the dephosphorylation of purine and pyrimidine ribo- and deoxyribonulceoside monophosphates to the corresponding nucleoside. Although CD73 has broad substrate specificity, it prefers purine ribonucleosides.

[0150] CD73 is also referred to as ecto-5′nuclease (ecto-5′NT, EC 3.1.3.5). The term “CD73” includes any variants or isoforms of CD73 which are naturally expressed by cells. Accordingly, antibodies described herein may cross-react with CD73 from species other than human (e.g., cynomolgus CD73). Alternatively, the antibodies may be specific for human CD73 and may not exhibit any cross-reactivity with other species. CD73 or any variants and isoforms thereof, may either be isolated from cells or tissues which naturally express them or be recombinantly produced using well-known techniques in the art and/or those described herein.

[0151] Two isoforms of human CD73 have been identified, both of which share the same N-terminal and C-terminal portions. Isoform 1 (Accession No. NP_002517.1; SEQ ID NO: 1) represents the longest protein, consisting of 574 amino acids and 9 exons. Isoform 2 (Accession No. NP_001191742.1; SEQ ID NO: 2) encodes a shorter protein, consisting of 524 amino acids, lacking amino acids 404-453. Isoform 2 lacks an alternate in-frame exon resulting in a transcript with only 8 exons, but with the same N- and C-terminal sequences.

[0152] The cynomolgus (cyno) CD73 protein sequence is provided as SEQ ID NO: 3. The terms cynomolgus and cyno both refer to the Macaca fascicularis species and are use interchangably throughout the specification.

[0153] As used herein, the terms “Programmed Death 1,” “Programmed Cell Death 1,” “Protein PD-1,” “PD-1,” PD1,” “PDCD1,” “hPD-1” and “hPD-I” are used interchangeably, and include variants, isoforms, species homologs of human PD-1, and analogs having at least one common epitope with PD-1. The complete PD-1 sequence can be found under GenBank Accession No. U64863.

[0154] The term “antibody” as used herein may include whole antibodies and any antigen binding fragments (i.e., “antigen-binding portions”) or single chains thereof. An “antibody” refers, in one embodiment, to a glycoprotein comprising at least two heavy (H) chains and two light (L) chains inter-connected by disulfide bonds, or an antigen binding portion thereof. Each heavy chain is comprised of a heavy chain variable region (abbreviated herein as V_{H}) and a heavy chain constant region. In certain naturally occurring IgG, IgD and IgA antibodies, the heavy chain constant region is comprised of three domains, CH1, CH2 and CH3. In certain naturally occurring antibodies, each light chain is comprised of a light chain variable region (abbreviated herein as V_{L}) and a light chain constant region. The light chain constant region is comprised of one domain, CL. The V_{H} and V_{L} regions can be further subdivided into regions of hypervariability, termed complementarity determining regions (CDR), interspersed with regions that are more conserved, termed framework regions (FR). Each V_{H} and V_{L} is composed of three CDRs and four FRs, arranged from amino-terminus to carboxy-terminus in the following order: FR1, CDR1, FR2, CDR2, FR3, CDR3, FR4. The variable regions of the heavy and light chains contain a binding domain that interacts with an antigen. The constant regions of the antibodies may mediate the binding of the immunoglobulin to host tissues or factors, including various cells of the immune system (e.g., effector cells) and the first component (Clq) of the classical complement system.

[0155] The heavy chain of an antibody may or may not contain a terminal lysine (K), or a terminal glycine and lysine (GK). Thus, any of the heavy chain sequences and heavy chain constant region sequences provided herein can end in either GK or G, or lack K or GK, regardless of what the last amino acid of the sequence provides. This is because the terminal lysine and sometimes glycine and lysine are cleaved during expression of the antibody.

[0156] Antibodies typically bind specifically to their cognate antigen with high affinity, reflected by a dissociation constant (K_{D}) of 10⁻⁷ to 10⁻¹¹M or less. Any K_{D} greater than about 10⁻⁶ M is generally considered to indicate nonspecific binding. As used herein, an antibody that “binds specifically” to an antigen refers to an antibody that binds to the antigen and substantially identical antigens with high affinity, which means having a K_{D} of 10⁻⁷ M or less, preferably 10⁻⁸ M or less, even more preferably 5×10⁻⁹ M or less, and most preferably between 10⁻⁸M and 10⁻¹⁰ M or less, but does not bind with high affinity to unrelated antigens. An antigen is “substantially identical” to a given antigen if it exhibits a high degree of sequence identity to the given antigen, for example, if it exhibits at least 80%, at least 90%, at least 95%, at least 97%, or at least 99% or greater sequence identity to the sequence of the given antigen. By way of example, an antibody that binds specifically to human CD73 may also cross-react with CD73 from certain non-human primate species (e.g., cynomolgus monkey), but may not cross-react with CD73 from other species, or with an antigen other than CD73.

[0157] An immunoglobulin may be from any of the commonly known isotypes, including but not limited to IgA, secretory IgA, IgG and IgM. The IgG isotype is divided in subclasses in certain species: IgG1, IgG2, IgG3 and IgG4 in humans, and IgG1, IgG2a, IgG2b and IgG3 in mice. In certain embodiments, the anti-CD73 antibodies described herein are of the human IgG1 or IgG2 subtype. Immunoglobulins, e.g., human IgG1, exist in several allotypes, which differ from each other in at most a few amino acids. “Antibody” may include, by way of example, both naturally occurring and non-naturally occurring antibodies; monoclonal and polyclonal antibodies; chimeric and humanized antibodies; human and nonhuman antibodies; wholly synthetic antibodies; and single chain antibodies.

[0158] The term “antigen-binding portion” of an antibody, as used herein, refers to one or more fragments of an antibody that retain the ability to specifically bind to an antigen (e.g., human CD73). It has been shown that the antigen-binding function of an antibody can be performed by fragments of a full-length antibody. Examples of binding fragments encompassed within the term “antigen-binding portion” of an antibody, e.g., an anti-CD73 antibody described herein, include (i) a Fab fragment, a monovalent fragment consisting of the V_{L}, V_{H}, CL and CH1 domains; (ii) a F(ab′)₂ fragment, a bivalent fragment comprising two Fab fragments linked by a disulfide bridge at the hinge region; (iii) a Fd fragment consisting of the V_{H} and CH1 domains; (iv) a Fv fragment consisting of the V_{L} and V_{H} domains of a single arm of an antibody, (v) a dAb fragment (Ward et al., (1989) Nature 341:544-546), which consists of a V_{H} domain; and (vi) an isolated complementarity determining region (CDR) or (vii) a combination of two or more isolated CDRs which may optionally be joined by a synthetic linker. Furthermore, although the two domains of the Fv fragment, V_{L} and V_{H}, are coded for by separate genes, they can be joined, using recombinant methods, by a synthetic linker that enables them to be made as a single protein chain in which the V_{L} and V_{H} regions pair to form monovalent molecules known as single chain Fv (scFv); see e.g., Bird et al. (1988) Science 242:423-426; and Huston et al. (1988) Proc. Natl. Acad. Sci. USA 85:5879-5883). Such single chain antibodies are also intended to be encompassed within the term “antigen-binding portion” of an antibody. These and other potential constructs are described at Chan & Carter (2010) Nat. Rev. Immunol. 10:301. These antibody fragments are obtained using conventional techniques known to those with skill in the art, and the fragments are screened for utility in the same manner as are intact antibodies. Antigen-binding portions can be produced by recombinant DNA techniques, or by enzymatic or chemical cleavage of intact immunoglobulins.

[0159] A “bispecific” or “bifunctional antibody” is an artificial hybrid antibody having two different heavy/light chain pairs, giving rise to two antigen binding sites with specificity for different antigens. Bispecific antibodies can be produced by a variety of methods including fusion of hybridomas or linking of Fab′ fragments. See, e.g., Songsivilai & Lachmann, Clin. Exp. Immunol. 79:315-321 (1990); Kostelny et al., J. Immunol. 148, 1547-1553 (1992).

[0160] The term “monoclonal antibody,” as used herein, refers to an antibody that displays a single binding specificity and affinity for a particular epitope or a composition of antibodies in which all antibodies display a single binding specificity and affinity for a particular epitope. Typically such monoclonal antibodies will be derived from a single cell or nucleic acid encoding the antibody, and will be propagated without intentionally introducing any sequence alterations. Accordingly, the term “human monoclonal antibody” refers to a monoclonal antibody that has variable and optional constant regions derived from human germline immunoglobulin sequences. In one embodiment, human monoclonal antibodies are produced by a hybridoma, for example, obtained by fusing a B cell obtained from a transgenic or transchromosomal non-human animal (e.g., a transgenic mouse having a genome comprising a human heavy chain transgene and a light chain transgene), to an immortalized cell.

[0161] The term “recombinant human antibody,” as used herein, includes all human antibodies that are prepared, expressed, created or isolated by recombinant means, such as (a) antibodies isolated from an animal (e.g., a mouse) that is transgenic or transchromosomal for human immunoglobulin genes or a hybridoma prepared therefrom, (b) antibodies isolated from a host cell transformed to express the antibody, e.g., from a transfectoma, (c) antibodies isolated from a recombinant, combinatorial human antibody library, and (d) antibodies prepared, expressed, created or isolated by any other means that involve splicing of human immunoglobulin gene sequences to other DNA sequences. Such recombinant human antibodies comprise variable and constant regions that utilize particular human germline immunoglobulin sequences and are encoded by the germline genes, but include subsequent rearrangements and mutations that occur, for example, during antibody maturation. As known in the art (see, e.g., Lonberg (2005) Nature Biotech. 23(9):1117-1125), the variable region contains the antigen binding domain, which is encoded by various genes that rearrange to form an antibody specific for a foreign antigen. In addition to rearrangement, the variable region can be further modified by multiple single amino acid changes (referred to as somatic mutation or hypermutation) to increase the affinity of the antibody to the foreign antigen. The constant region will change in further response to an antigen (i.e isotype switch). Therefore, the rearranged and somatically mutated nucleic acid sequences that encode the light chain and heavy chain immunoglobulin polypeptides in response to an antigen may not be identical to the original germline sequences, but instead will be substantially identical or similar (i.e., have at least 80% identity).

[0162] A “human” antibody (HuMAb) refers to an antibody having variable regions in which both the framework and CDR regions are derived from human germline immunoglobulin sequences. Furthermore, if the antibody contains a constant region, the constant region also is derived from human germline immunoglobulin sequences. The antibodies described herein may include amino acid residues not encoded by human germline immunoglobulin sequences (e.g., mutations introduced by random or site-specific mutagenesis in vitro or by somatic mutation in vivo). However, the term “human antibody”, as used herein, is not intended to include antibodies in which CDR sequences derived from the germline of another mammalian species, such as a mouse, have been grafted onto human framework sequences. The terms “human” antibodies and “fully human” antibodies and are used synonymously.

[0163] A “humanized” antibody refers to an antibody in which some, most or all of the amino acids outside the CDR domains of a non-human antibody are replaced with corresponding amino acids derived from human immunoglobulins. In one embodiment of a humanized form of an antibody, some, most or all of the amino acids outside the CDR domains have been replaced with amino acids from human immunoglobulins, whereas some, most or all amino acids within one or more CDR regions are unchanged. Small additions, deletions, insertions, substitutions or modifications of amino acids are permissible as long as they do not abrogate the ability of the antibody to bind to a particular antigen. A “humanized” antibody retains an antigenic specificity similar to that of the original antibody.

[0164] A “chimeric antibody” refers to an antibody in which the variable regions are derived from one species and the constant regions are derived from another species, such as an antibody in which the variable regions are derived from a mouse antibody and the constant regions are derived from a human antibody.

[0165] A “modified heavy chain constant region” refers to a heavy chain constant region comprising the constant domains CH1, hinge, CH2, and CH3, wherein one or more of the constant domains are from a different isotype (e.g. IgG1, IgG2, IgG3, IgG4). In certain embodiments, the modified constant region includes a human IgG2 CH1 domain and a human IgG2 hinge fused to a human IgG1 CH2 domain and a human IgG1 CH3 domain. In certain embodiments, such modified constant regions also include amino acid modifications within one or more of the domains relative to the wildtype amino acid sequence.

[0166] When referring herein to an antibody as “CD73.3” or “CD73.4” without indicating the identity of the constant region, unless otherwise indicated, refers to antibodies having the variable regions of CD73.3 or CD73.4, respectively, with any constant region described herein.

[0167] As used herein, “isotype” refers to the antibody class (e.g., IgG1, IgG2, IgG3, IgG4, IgM, IgA1, IgA2, IgD, and IgE antibody) that is encoded by the heavy chain constant region genes.

[0168] “Allotype” refers to naturally occurring variants within a specific isotype group, which variants differ in a few amino acids (see, e.g., Jefferis et al. (2009) mAbs 1:1). Antibodies described herein may be of any allotype.

[0169] Unless specified otherwise herein, all amino acid numbers are according to the EU index of the Kabat system (Kabat, E. A., et al. (1991) Sequences of Proteins of Immunological Interest, Fifth Edition, U.S. Department of Health and Human Services, NIH Publication No. 91-3242).

[0170] The phrases “an antibody recognizing an antigen” and “an antibody specific for an antigen” are used interchangeably herein with the term “an antibody which binds specifically to an antigen.”

[0171] An “isolated antibody,” as used herein, is intended to refer to an antibody that is substantially free of other antibodies having different antigenic specificities (e.g., an isolated antibody that specifically binds to CD73 is substantially free of antibodies that specifically bind antigens other than CD73). An isolated antibody that specifically binds to an epitope of CD73 may, however, have cross-reactivity to other CD73 proteins from different species.

[0172] As used herein, an antibody that “inhibits CD73” refers to an antibody that inhibits a biological and/or enzymatic function of CD73. These functions include, for example, the ability of an antibody to inhibit CD73 enzymatic activity, e.g., CD73-regulated production of adenosine or reduction of cAMP production.

[0173] As used herein, an antibody that “internalizes” refers to an antibody that crosses the cell membrane upon binding to a cell-surface antigen. Internalization includes antibody mediated receptor, e.g., CD73, internalization. In some embodiments, the antibody “internalizes” into cells expressing CD73 at a rate of T_{1/2} equal to about 10 min or less.

[0174] An “effector function” refers to the interaction of an antibody Fc region with an Fc receptor or ligand, or a biochemical event that results therefrom. Exemplary “effector functions” include Clq binding, complement dependent cytotoxicity (CDC), Fc receptor binding, FcγR-mediated effector functions such as ADCC and antibody dependent cell-mediated phagocytosis (ADCP), and downregulation of a cell surface receptor (e.g., the B cell receptor; BCR). Such effector functions generally require the Fc region to be combined with a binding domain (e.g., an antibody variable domain).

[0175] An “Fc receptor” or “FcR” is a receptor that binds to the Fc region of an immunoglobulin. FcRs that bind to an IgG antibody comprise receptors of the FcγR family, including allelic variants and alternatively spliced forms of these receptors. The FcγR family consists of three activating (FcγRI, FcγRIII, and FcγRIV in mice; FcγRIA, FcγRIIA, and FcγRIIIA in humans) and one inhibitory (FcγRIIB) receptor. Various properties of human FcγRs are summarized in Table 1. The majority of innate effector cell types coexpress one or more activating FcγR and the inhibitory FcγRIIB, whereas natural killer (NK) cells selectively express one activating Fc receptor (FcγRIII in mice and FcγRIIIA in humans) but not the inhibitory FcγRIIB in mice and humans. Human IgG1 binds to most human Fc receptors and is considered equivalent to murine IgG2a with respect to the types of activating Fc receptors that it binds to.

TABLE 1
Properties of human FcγRs

| | Allelic | Affinity for | | |
|---|---|---|---|---|
| Fcγ | variants | human IgG | Isotype preference | Cellular distribution |
| FcγRI | None | High (K_{D} ~10 nM) | IgG1 = 3 > 4 >> 2 | Monocytes, macrophages, |
| | described | | | activated neutrophils, dentritic |
| | | | | cells? |
| FcγRIIA | H131 | Low to medium | IgG1 > 3 > 2 > 4 | Neutrophils, monocytes, |
| | R131 | Low | IgG1 > 3 > 4 > 2 | macrophages, eosinophils, |
| | | | | dentritic cells, platelets |
| FcγRIIIA | V158 | Medium | IgG1 = 3 >> 4 > 2 | NK cells, monocytes, |
| | F158 | Low | IgG1 = 3 >> 4 > 2 | macrophages, mast cells, |
| | | | | eosinophils, dentritic cells? |
| FcγRIIB | I232 | Low | IgG1 = 3 = 4 > 2 | B cells, monocytes, |
| | T232 | Low | IgG1 = 3 = 4 > 2 | macrophages, dentritic cells, |
| | | | | mast cells |

[0176] A “hinge”, “hinge domain” or “hinge region” or “antibody hinge region” refers to the domain of a heavy chain constant region that joins the CH1 domain to the CH2 domain and includes the upper, middle, and lower portions of the hinge (Roux et al. J. Immunol. 1998 161:4083). The hinge provides varying levels of flexibility between the binding and effector regions of an antibody and also provides sites for intermolecular disulfide bonding between the two heavy chain constant regions. As used herein, a hinge starts at Glu216 and ends at Gly237 for all IgG isotypes (Roux et al., 1998 J Immunol 161:4083). The sequences of wildtype IgG1, IgG2, IgG3 and IgG4 hinges are show in Tables 2 and 37.

TABLE 2
Hinge region amino acids

| | C-terminal C_{H}1* | Upper Hinge | | Lower Hinge |
|---|---|---|---|---|
| Ig Type | (SEQ ID NO) | (SEQ ID NO) | Middle Hinge (SEQ ID NO) | (SEQ ID NO) |
| IgG1 | VDKRV (284) | EPKSCDKTHT (286) | CPPCP (290) | APELLGG (298) |
| IgG2 | VDKTV (285) | ERK | CCVECPPCP (291) | APPVAG (299) |
| IgG3 | VDKRV (284) | ELKTPLGDTTHT (287) | CPRCP (EPKSCDTPPPCPRCP)₃ (292) | APELLGG (298) |
| (17-15-15-15) | | | | |
| IgG3 (17-15-15) | VDKRV (284) | ELKTPLGDTTHT (287) | CPRCP (EPKSCDTPPPCPRCP)₂ (293) | APELLGG (298) |
| IgG3 (17-15) | VDKRV (284) | ELKTPLGDTTHT (287) | CPRCP (EPKSCDTPPPCPRCP)₃ (294) | APELLGG (298) |
| IgG3 (15-15-15) | VDKRV (284) | EPKS (288) | CDTPPPCPRCP (EPKSCDTPPPCPRCP)₂ | APELLGG (298) |
| | | | (295) | |
| IgG3 (15) | VDKRV (284) | EPKS (288) | CDTPPPCPRCP (296) | APELLGG (298) |
| IgG4 | VDKRV (284) | ESKYGPP (289) | CPSCP (297) | APEFLGG (298) |

*C-terminal amino acid sequences of the CH1 domains.

[0177] The term “hinge” includes wildtype hinges (such as those set forth in Tables 2 and 37), as well as variants thereof (e.g., non-naturally-occurring hinges or modified hinges). For example, the term “IgG2 hinge” includes wildtype IgG2 hinge, as shown in Table 2, and variants having 1, 2, 3, 4, 5, 1-3, 1-5, 3-5 and/or at most 5, 4, 3, 2, or 1 mutations, e.g., substitutions, deletions or additions. Exemplary IgG2 hinge variants include IgG2 hinges in which 1, 2, 3 or all 4 cysteines (C219, C220, C226 and C229) are changed to another amino acid. In a specific embodiment, an IgG2 comprises a C219S substitution. An IgG2 hinge may also comprise a substitution at C220 or substitutions at both C219 and a C220. An IgG2 hinge may comprise a substitution, which alone, or together with one or more substitutions in other regions of the heavy or light chain will cause the antibody to take form A or B (see, e.g., Allen et al. (2009) Biochemistry 48:3755). In certain embodiments, a hinge is a hybrid hinge that comprises sequences from at least two isotypes. For example, a hinge may comprise the upper, middle or lower hinge from one isotype and the remainder of the hinge from one or more other isotypes. For example, a hinge can be an IgG2/IgG1 hinge, and may comprise, e.g., the upper and middle hinges of IgG2 and the lower hinge of IgG1. A hinge may have effector function or be deprived of effector function. For example, the lower hinge of wildtype IgG1 provides effector function.

[0178] The term “CH1 domain” refers to the heavy chain constant region linking the variable domain to the hinge in a heavy chain constant domain. As used herein, a CH1 domain starts at A118 and ends at V215. The term “CH1 domain” includes wildtype CH1 domains (such as having SEQ ID NO: 98 for IgG1 and SEQ ID NO: 124 for IgG2), as well as variants thereof (e.g., non-naturally-occurring CH1 domains or modified CH1 domains). For example, the term “CH1 domain” includes wildtype CH1 domains and variants thereof having 1, 2, 3, 4, 5, 1-3, 1-5, 3-5 and/or at most 5, 4, 3, 2, or 1 mutations, e.g., substitutions, deletions or additions. Exemplary CH1 domains include CH1 domains with mutations that modify a biological activity of an antibody, such as ADCC, CDC or half-life. Modifications to the CH1 domain that affect a biological activity of an antibody are provided herein. A CH1 domain may comprise the substitution C131S, which substitution may cause an IgG2 antibody or an antibody comprising at least a portion of an IgG2 antibody, such as the hinge and/or the hinge and CH1, to adopt the B form, as opposed to the A form of the antibody.

[0179] The term “CH2 domain” refers to the heavy chain constant region linking the hinge to the CH3 domain in a heavy chain constant domain. As used herein, a CH2 domain starts at P238 and ends at K340. The term “CH2 domain” includes wildtype CH2 domains (such as having SEQ ID NO: 137 for IgG1; Table 37), as well as variants thereof (e.g., non-naturally-occurring CH2 domains or modified CH2 domains). For example, the term “CH2 domain” includes wildtype CH2 domains and variants thereof having 1, 2, 3, 4, 5, 1-3, 1-5, 3-5 and/or at most 5, 4, 3, 2, or 1 mutations, e.g., substitutions, deletions or additions. Exemplary CH2 domains include CH2 domains with mutations that modify a biological activity of an antibody, such as ADCC, CDC or half-life. In certain embodiments, a CH2 domain comprises the substitutions A330S/P331S that reduce effector function. Other modifications to the CH2 domain that affect a biological activity of an antibody are provided herein.

[0180] The term “CH3 domain” refers to the heavy chain constant region that is C-terminal to the CH2 domain in a heavy chain constant domain. As used herein, a CH3 domain starts at G341 and ends at K447. The term “CH3 domain” includes wildtype CH3 domains (such as having SEQ ID NO: 138 for IgG1; Table 37), as well as variants thereof (e.g., non-naturally-occurring CH3 domains or modified CH3 domains). For example, the term “CH3 domain” includes wildtype CH3 domains and variants thereof having 1, 2, 3, 4, 5, 1-3, 1-5, 3-5 and/or at most 5, 4, 3, 2, or 1 mutations, e.g., substitutions, deletions or additions. Exemplary CH3 domains include CH3 domains with mutations that modify a biological activity of an antibody, such as ADCC, CDC or half-life. Modifications to the CH3 domain that affect a biological activity of an antibody are provided herein.

[0181] A “CL domain” refers to the constant domain of a light chain. The term “CL domain” includes wildtype CL domains and variants thereof, e.g., variants comprising C214S.

[0182] A “native sequence Fc region” or “native sequence Fc” comprises an amino acid sequence that is identical to the amino acid sequence of an Fc region found in nature. Native sequence human Fc regions include a native sequence human IgG1 Fc region; native sequence human IgG2 Fc region; native sequence human IgG3 Fc region; and native sequence human IgG4 Fc region as well as naturally occurring variants thereof. Native sequence Fc includes the various allotypes of Fcs (see, e.g., Jefferis et al. (2009) mAbs 1:1).

[0183] The term “epitope” or “antigenic determinant” refers to a site on an antigen (e.g., CD73) to which an immunoglobulin or antibody specifically binds. Epitopes within protein antigens can be formed both from contiguous amino acids (usually a linear epitope) or noncontiguous amino acids juxtaposed by tertiary folding of the protein (usually a conformational epitope). Epitopes formed from contiguous amino acids are typically, but not always, retained on exposure to denaturing solvents, whereas epitopes formed by tertiary folding are typically lost on treatment with denaturing solvents. An epitope typically includes at least 3, 4, 5, 6, 7, 8, 9, 10, 11, 12, 13, 14 or 15 amino acids in a unique spatial conformation. Methods for determining what epitopes are bound by a given antibody (i.e., epitope mapping) are well known in the art and include, for example, immunoblotting and immunoprecipitation assays, wherein overlapping or contiguous peptides (e.g., from CD73) are tested for reactivity with a given antibody (e.g., anti-CD73 antibody). Methods of determining spatial conformation of epitopes include techniques in the art and those described herein, for example, x-ray crystallography, 2-dimensional nuclear magnetic resonance and HDX-MS (see, e.g., Epitope Mapping Protocols in Methods in Molecular Biology, Vol. 66, G. E. Morris, Ed. (1996)).

[0184] The term “epitope mapping” refers to the process of identification of the molecular determinants on the antigen involved in antibody-antigen recognition.

[0185] The term “binds to the same epitope” with reference to two or more antibodies means that the antibodies bind to the same segment of amino acid residues, as determined by a given method. Techniques for determining whether antibodies bind to the “same epitope on CD73” with the antibodies described herein include, for example, epitope mapping methods, such as, x-ray analyses of crystals of antigen:antibody complexes, which provides atomic resolution of the epitope, and hydrogen/deuterium exchange mass spectrometry (HDX-MS). Other methods that monitor the binding of the antibody to antigen fragments (e.g. proteolytic fragments) or to mutated variations of the antigen where loss of binding due to a modification of an amino acid residue within the antigen sequence is often considered an indication of an epitope component (e.g. alanine scanning mutagenesis—Cunningham & Wells (1985) Science 244:1081). In addition, computational combinatorial methods for epitope mapping can also be used. These methods rely on the ability of the antibody of interest to affinity isolate specific short peptides from combinatorial phage display peptide libraries.

[0186] Antibodies that “compete with another antibody for binding to a target” refer to antibodies that inhibit (partially or completely) the binding of the other antibody to the target. Whether two antibodies compete with each other for binding to a target, i.e., whether and to what extent one antibody inhibits the binding of the other antibody to a target, may be determined using known competition experiments, e.g, such as those described in the Examples. In certain embodiments, an antibody competes with, and inhibits binding of another antibody to a target by at least 10%, 20%, 30%, 40%, 50%, 60%, 70%, 80%, 90% or 100%. The level of inhibition or competition may be different depending on which antibody is the “blocking antibody” (i.e., the cold antibody that is incubated first with the target). Competition assays can be conducted as described, for example, in Ed Harlow and David Lane, Cold Spring Harb Protoc; 2006; doi:10.1101/pdb.prot4277 or in Chapter 11 of “Using Antibodies” by Ed Harlow and David Lane, Cold Spring Harbor Laboratory Press, Cold Spring Harbor, N.Y., USA 1999. Competing antibodies bind to the same epitope, an overlapping epitope or to adjacent epitopes (e.g., as evidenced by steric hindrance).

[0187] Other competitive binding assays include: solid phase direct or indirect radioimmunoassay (MA), solid phase direct or indirect enzyme immunoassay (EIA), sandwich competition assay (see Stahli et al., Methods in Enzymology 9:242 (1983)); solid phase direct biotin-avidin EIA (see Kirkland et al., J. Immunol. 137:3614 (1986)); solid phase direct labeled assay, solid phase direct labeled sandwich assay (see Harlow and Lane, Antibodies: A Laboratory Manual, Cold Spring Harbor Press (1988)); solid phase direct label RIA using I-125 label (see Morel et al., Mol. Immunol. 25(1):7 (1988)); solid phase direct biotin-avidin EIA (Cheung et al., Virology 176:546 (1990)); and direct labeled RIA. (Moldenhauer et al., Scand. J. Immunol. 32:77 (1990)).

[0188] As used herein, the terms “specific binding,” “selective binding,” “selectively binds,” and “specifically binds,” refer to antibody binding to an epitope on a predetermined antigen but not to other antigens. Typically, the antibody (i) binds with an equilibrium dissociation constant (K_{D}) of approximately less than 10⁻⁷ M, such as approximately less than 10⁻⁸ M, 10⁻⁹ M or 10⁻¹⁰ M or even lower when determined by, e.g., surface plasmon resonance (SPR) technology in a BIACORE® 2000 surface plasmon resonance instrument using the predetermined antigen, e.g., recombinant human CD73, as the analyte and the antibody as the ligand, or Scatchard analysis of binding of the antibody to antigen positive cells, and (ii) binds to the predetermined antigen with an affinity that is at least two-fold greater than its affinity for binding to a non-specific antigen (e.g., BSA, casein) other than the predetermined antigen or a closely-related antigen. Accordingly, unless otherwise indicated, an antibody that “specifically binds to human CD73” refers to an antibody that binds to soluble or cell bound human CD73 with a K_{D} of 10⁻⁷ M or less, such as approximately less than 10⁻⁸M, 10⁻⁹M or 10⁻¹⁰ M or even lower. An antibody that “cross-reacts with cynomolgus CD73” refers to an antibody that binds to cynomolgus CD73 with a K_{D} of 10⁻⁷ M or less, such as less than 10⁻⁸ M, 10⁻⁹ M or 10⁻¹⁰ M or even lower. In certain embodiments, antibodies that do not cross-react with CD73 from a non-human species exhibit essentially undetectable binding against these proteins in standard binding assays.

[0189] The term “k_{assoc}” or “kₐ”, as used herein, is intended to refer to the association rate constant of a particular antibody-antigen interaction, whereas the term “k_{dis}” or “k_{d},” as used herein, is intended to refer to the dissociation rate constant of a particular antibody-antigen interaction. The term “K_{D}”, as used herein, is intended to refer to the equilibrium dissociation constant, which is obtained from the ratio of k_{d} to kₐ (i.e, k_{d}/kₐ) and is expressed as a molar concentration (M). K_{D} values for antibodies can be determined using methods well established in the art. A preferred method for determining the K_{D} of an antibody is by using surface plasmon resonance, preferably using a biosensor system such as a Biacore® surface plasmon resonance system or flow cytometry and Scatchard analysis.

[0190] The term “EC50” in the context of an in vitro or in vivo assay using an antibody or antigen binding fragment thereof, refers to the concentration of an antibody or an antigen-binding portion thereof that induces a response that is 50% of the maximal response, i.e., halfway between the maximal response and the baseline.

[0191] A “rate of internalization” of an antibody or of a receptor, e.g., CD73, as mediated by the antibody, e.g., an anti-CD73 antibody, may be represented, e.g., by T_{1/2} of internalization, e.g., as shown in the Examples. A rate of internalization of an anti-CD73 antibody may be enhanced or increased by at least 10%, 30%, 50%, 75%, 2 fold, 3 fold, 5 fold or more, resulting in a reduction of the T_{1/2} by at least 10%, 30%, 50%, 75%, 2 fold, 3 fold, 5 fold or more by changing the heavy chain constant region of the antibody to a modified heavy chain constant region, e.g., one that contains an IgG2 hinge and IgG2 CH1 domain. For example, instead of having a T_{1/2} of 10 minutes, a modified heavy chain constant region may increase the rate of internalization and thereby reduce the T_{1/2} to 5 minutes (i.e., a two fold increase in rate of internalization or a two-fold decrease in T_{1/2}). “T_{1/2}” is defined as the time at which half of the maximal internalization is achieved, as measured from the time the antibody is added to the cells. The maximal level of internalization can be the level of internalization at the plateau of a graph representing the internalization plotted against antibody concentrations. A modified heavy chain constant region may increase the maximal level of internalization of an antibody by at least 10%, 30%, 50%, 75%, 2 fold, 3 fold, 5 fold or more. Another way of comparing internalization efficacies of different antibodies, such as an antibody with, and the same antibody without, a modified heavy chain constant region, is by comparing their level of internalization at a given antibody concentration (e.g., 100 nM) or at a given time (e.g., 2 minutes, 5 minutes, 10 minutes or 30 minutes). Comparing levels of internalization can also be done by comparing the EC₅₀ levels of internalization. The level of internalization of one antibody can be defined relative to that of a given (reference) antibody, e.g., an antibody described herein, e.g., 11F11 or CD73.4-IgG2CS-IgG1 or CD73.4-IgG2CS-IgG1.1f, and, can be indicated as a percentage of the value obtained with the given (reference) antibody. The extent of internalization may be enhanced by at least 10%, 30%, 50%, 75%, 2 fold, 3 fold, 5 fold or more, as compared by any one of these methods.

[0192] The term “naturally-occurring” as used herein as applied to an object refers to the fact that an object can be found in nature. For example, a polypeptide or polynucleotide sequence that is present in an organism (including viruses) that can be isolated from a source in nature and which has not been intentionally modified by man in the laboratory is naturally-occurring.

[0193] A “polypeptide” refers to a chain comprising at least two consecutively linked amino acid residues, with no upper limit on the length of the chain. One or more amino acid residues in the protein may contain a modification such as, but not limited to, glycosylation, phosphorylation or a disulfide bond. A “protein” may comprise one or more polypeptides.

[0194] The term “nucleic acid molecule,” as used herein, is intended to include DNA molecules and RNA molecules. A nucleic acid molecule may be single-stranded or double-stranded, and may be cDNA. In certain embodiments, a DNA molecule does not encompass naturally-occurring DNA molecules.

[0195] Also provided are “conservative sequence modifications” of the sequences set forth in SEQ ID NOs described herein, i.e., nucleotide and amino acid sequence modifications which do not abrogate the binding of the antibody encoded by the nucleotide sequence or containing the amino acid sequence, to the antigen. Such conservative sequence modifications include conservative nucleotide and amino acid substitutions, as well as, nucleotide and amino acid additions and deletions. For example, modifications can be introduced into SEQ ID NOs described herein by standard techniques known in the art, such as site-directed mutagenesis and PCR-mediated mutagenesis. Conservative sequence modifications include conservative amino acid substitutions, in which the amino acid residue is replaced with an amino acid residue having a similar side chain. Families of amino acid residues having similar side chains have been defined in the art. These families include amino acids with basic side chains (e.g., lysine, arginine, histidine), acidic side chains (e.g., aspartic acid, glutamic acid), uncharged polar side chains (e.g., glycine, asparagine, glutamine, serine, threonine, tyrosine, cysteine, tryptophan), nonpolar side chains (e.g., alanine, valine, leucine, isoleucine, proline, phenylalanine, methionine), beta-branched side chains (e.g., threonine, valine, isoleucine) and aromatic side chains (e.g., tyrosine, phenylalanine, tryptophan, histidine). Thus, a predicted nonessential amino acid residue in an anti-CD73 antibody is preferably replaced with another amino acid residue from the same side chain family. Methods of identifying nucleotide and amino acid conservative substitutions that do not eliminate antigen binding are well-known in the art (see, e.g., Brummell et al., Biochem. 32:1180-1187 (1993); Kobayashi et al. Protein Eng. 12(10):879-884 (1999); and Burks et al. Proc. Natl. Acad. Sci. USA 94:412-417 (1997)).

[0196] Alternatively, in another embodiment, mutations can be introduced randomly along all or part of an anti-CD73 antibody coding sequence, such as by saturation mutagenesis, and the resulting modified anti-CD73 antibodies can be screened for improved binding activity.

[0197] For nucleic acids, the term “substantial homology” indicates that two nucleic acids, or designated sequences thereof, when optimally aligned and compared, are identical, with appropriate nucleotide insertions or deletions, in at least about 80% of the nucleotides, usually at least about 90% to 95%, and more preferably at least about 98% to 99.5% of the nucleotides. Alternatively, substantial homology exists when the segments will hybridize under selective hybridization conditions, to the complement of the strand.

[0198] For polypeptides, the term “substantial homology” indicates that two polypeptides, or designated sequences thereof, when optimally aligned and compared, are identical, with appropriate amino acid insertions or deletions, in at least about 80% of the amino acids, usually at least about 90% to 95%, and more preferably at least about 98% to 99.5% of the amino acids.

[0199] The percent identity between two sequences is a function of the number of identical positions shared by the sequences when the sequences are optimally aligned (i.e., % homology=# of identical positions/total # of positions×100), with optimal alignment determined taking into account the number of gaps, and the length of each gap, which need to be introduced for optimal alignment of the two sequences. The comparison of sequences and determination of percent identity between two sequences can be accomplished using a mathematical algorithm, as described in the non-limiting examples below.

[0200] The percent identity between two nucleotide sequences can be determined using the GAP program in the GCG software package (available at http://www.gcg.com), using a NWSgapdna.CMP matrix and a gap weight of 40, 50, 60, 70, or 80 and a length weight of 1, 2, 3, 4, 5, or 6. The percent identity between two nucleotide or amino acid sequences can also be determined using the algorithm of E. Meyers and W. Miller (CABIOS, 4:11-17 (1989)) which has been incorporated into the ALIGN program (version 2.0), using a PAM120 weight residue table, a gap length penalty of 12 and a gap penalty of 4. In addition, the percent identity between two amino acid sequences can be determined using the Needleman and Wunsch (J. Mol. Biol. (48):444-453 (1970)) algorithm which has been incorporated into the GAP program in the GCG software package (available at http://www.gcg.com), using either a Blossum 62 matrix or a PAM250 matrix, and a gap weight of 16, 14, 12, 10, 8, 6, or 4 and a length weight of 1, 2, 3, 4, 5, or 6.

[0201] The nucleic acid and protein sequences described herein can further be used as a “query sequence” to perform a search against public databases to, for example, identify related sequences. Such searches can be performed using the NBLAST and XBLAST programs (version 2.0) of Altschul, et al. (1990) J. Mol. Biol. 215:403-10. BLAST nucleotide searches can be performed with the NBLAST program, score=100, wordlength=12 to obtain nucleotide sequences homologous to the nucleic acid molecules described herein. BLAST protein searches can be performed with the XBLAST program, score=50, wordlength=3 to obtain amino acid sequences homologous to the protein molecules described herein. To obtain gapped alignments for comparison purposes, Gapped BLAST can be utilized as described in Altschul et al., (1997) Nucleic Acids Res. 25(17):3389-3402. When utilizing BLAST and Gapped BLAST programs, the default parameters of the respective programs (e.g., XBLAST and NBLAST) can be used. See www.ncbi.nlm.nih.gov.

[0202] The nucleic acids may be present in whole cells, in a cell lysate, or in a partially purified or substantially pure form. A nucleic acid is “isolated” or “rendered substantially pure” when purified away from other cellular components or other contaminants, e.g., other cellular nucleic acids (e.g., the other parts of the chromosome) or proteins, by standard techniques, including alkaline/SDS treatment, CsCl banding, column chromatography, agarose gel electrophoresis and others well known in the art. See, F. Ausubel, et al., ed. Current Protocols in Molecular Biology, Greene Publishing and Wiley Interscience, New York (1987).

[0203] Nucleic acids, e.g., cDNA, may be mutated, in accordance with standard techniques to provide gene sequences. For coding sequences, these mutations may affect amino acid sequence as desired. In particular, DNA sequences substantially homologous to or derived from native V, D, J, constant, switches and other such sequences described herein are contemplated.

[0204] The term “vector,” as used herein, is intended to refer to a nucleic acid molecule capable of transporting another nucleic acid to which it has been linked. One type of vector is a “plasmid,” which refers to a circular double stranded DNA loop into which additional DNA segments may be ligated. Another type of vector is a viral vector, wherein additional DNA segments may be ligated into the viral genome. Certain vectors are capable of autonomous replication in a host cell into which they are introduced (e.g., bacterial vectors having a bacterial origin of replication and episomal mammalian vectors). Other vectors (e.g., non-episomal mammalian vectors) can be integrated into the genome of a host cell upon introduction into the host cell, and thereby are replicated along with the host genome. Moreover, certain vectors are capable of directing the expression of genes to which they are operatively linked. Such vectors are referred to herein as “recombinant expression vectors” (or simply, “expression vectors”). In general, expression vectors of utility in recombinant DNA techniques are often in the form of plasmids. In the present specification, “plasmid” and “vector” may be used interchangeably as the plasmid is the most commonly used form of vector. However, also included are other forms of expression vectors, such as viral vectors (e.g., replication defective retroviruses, adenoviruses and adeno-associated viruses), which serve equivalent functions.

[0205] The term “recombinant host cell” (or simply “host cell”), as used herein, is intended to refer to a cell that comprises a nucleic acid that is not naturally present in the cell, and maybe a cell into which a recombinant expression vector has been introduced. It should be understood that such terms are intended to refer not only to the particular subject cell but to the progeny of such a cell. Because certain modifications may occur in succeeding generations due to either mutation or environmental influences, such progeny may not, in fact, be identical to the parent cell, but are still included within the scope of the term “host cell” as used herein.

[0206] As used herein, the term “antigen” refers to any natural or synthetic immunogenic substance, such as a protein, peptide, or hapten. An antigen may be CD73 or a fragment thereof.

[0207] An “immune response” refers to a biological response within a vertebrate against foreign agents, which response protects the organism against these agents and diseases caused by them. An immune response is mediated by the action of a cell of the immune system (for example, a T lymphocyte, B lymphocyte, natural killer (NK) cell, macrophage, eosinophil, mast cell, dendritic cell or neutrophil) and soluble macromolecules produced by any of these cells or the liver (including antibodies, cytokines, and complement) that results in selective targeting, binding to, damage to, destruction of, and/or elimination from the vertebrate's body of invading pathogens, cells or tissues infected with pathogens, cancerous or other abnormal cells, or, in cases of autoimmunity or pathological inflammation, normal human cells or tissues. An immune response or reaction includes, e.g., activation or inhibition of a T cell, e.g., an effector T cell or a Th cell, such as a CD4+ or CD8+ T cell, or the inhibition of a Treg cell.

[0208] An “immunomodulator” or “immunoregulator” refers to an agent, e.g., a component of a signaling pathway, which may be involved in modulating, regulating, or modifying an immune response. “Modulating,” “regulating,” or “modifying” an immune response refers to any alteration in a cell of the immune system or in the activity of such cell (e.g., an effector T cell). Such modulation includes stimulation or suppression of the immune system which may be manifested by an increase or decrease in the number of various cell types, an increase or decrease in the activity of these cells, or any other changes which can occur within the immune system. Both inhibitory and stimulatory immunomodulators have been identified, some of which may have enhanced function in a tumor microenvironment. The immunomodulator may be located on the surface of a T cell. An “immunomodulatory target” or “immunoregulatory target” is an immunomodulator that is targeted for binding by, and whose activity is altered by the binding of, a substance, agent, moiety, compound or molecule. Immunomodulatory targets include, for example, receptors on the surface of a cell (“immunomodulatory receptors”) and receptor ligands (“immunomodulatory ligands”).

[0209] An increased ability to stimulate an immune response, or the immune system, can result from an enhanced agonist activity of T cell costimulatory receptors and/or an enhanced antagonist activity of inhibitory receptors. An increased ability to stimulate an immune response or the immune system may be reflected by a fold increase of the EC50 or maximal level of activity in an assay that measures an immune response, e.g., an assay that measures changes in cytokine or chemokine release, cytolytic activity (determined directly on target cells or indirectly via detecting CD107a or granzymes) and proliferation. The ability to stimulate an immune response or the immune system activity may be enhanced by at least 10%, 30%, 50%, 75%, 2 fold, 3 fold, 5 fold or more.

[0210] “Immunotherapy” refers to the treatment of a subject afflicted with, or at risk of contracting or suffering a recurrence of, a disease by a method comprising inducing, enhancing, suppressing or otherwise modifying an immune response.

[0211] “Immunostimulating therapy” or “immunostimulatory therapy” refers to a therapy that results in increasing (inducing or enhancing) an immune response in a subject for, e.g., treating cancer.

[0212] “Potentiating an endogenous immune response” means increasing the effectiveness or potency of an existing immune response in a subject. This increase in effectiveness and potency may be achieved, for example, by overcoming mechanisms that suppress the endogenous host immune response or by stimulating mechanisms that enhance the endogenous host immune response.

[0213] “T effector” (“T_{eff}”) cells refers to T cells (e.g., CD4+ and CD8+ T cells) with cytolytic activities as well as T helper (Th) cells, which secrete cytokines and activate and direct other immune cells, but does not include regulatory T cells (Treg cells).

[0214] As used herein, the term “linked” refers to the association of two or more molecules. The linkage can be covalent or non-covalent. The linkage also can be genetic (i.e., recombinantly fused). Such linkages can be achieved using a wide variety of art recognized techniques, such as chemical conjugation and recombinant protein production.

[0215] As used herein, “administering” refers to the physical introduction of a composition comprising a therapeutic agent to a subject, using any of the various methods and delivery systems known to those skilled in the art. Preferred routes of administration for antibodies described herein include intravenous, intraperitoneal, intramuscular, subcutaneous, spinal or other parenteral routes of administration, for example by injection or infusion. The phrase “parenteral administration” as used herein means modes of administration other than enteral and topical administration, usually by injection, and includes, without limitation, intravenous, intraperitoneal, intramuscular, intraarterial, intrathecal, intralymphatic, intralesional, intracapsular, intraorbital, intracardiac, intradermal, transtracheal, subcutaneous, subcuticular, intraarticular, subcapsular, subarachnoid, intraspinal, epidural and intrasternal injection and infusion, as well as in vivo electroporation. Alternatively, an antibody described herein can be administered via a non-parenteral route, such as a topical, epidermal or mucosal route of administration, for example, intranasally, orally, vaginally, rectally, sublingually or topically. Administering can also be performed, for example, once, a plurality of times, and/or over one or more extended periods.

[0216] As used herein, the term “T cell-mediated response” refers to a response mediated by T cells, including effector T cells (e.g., CD8⁺ cells) and helper T cells (e.g., CD4⁺ cells). T cell mediated responses include, for example, T cell cytotoxicity and proliferation.

[0217] As used herein, the term “cytotoxic T lymphocyte (CTL) response” refers to an immune response induced by cytotoxic T cells. CTL responses are mediated primarily by CD8⁺ T cells.

[0218] As used herein, the terms “inhibits” or “blocks” (e.g., referring to inhibition/blocking of CD73 binding or activity) are used interchangeably and encompass both partial and complete inhibition/blocking.

[0219] As used herein, “cancer” refers a broad group of diseases characterized by the uncontrolled growth of abnormal cells in the body. Unregulated cell division may result in the formation of malignant tumors or cells that invade neighboring tissues and may metastasize to distant parts of the body through the lymphatic system or bloodstream.

[0220] The terms “treat,” “treating,” and “treatment,” as used herein, refer to any type of intervention or process performed on, or administering an active agent to, the subject with the objective of reversing, alleviating, ameliorating, inhibiting, or slowing down or preventing the progression, development, severity or recurrence of a symptom, complication, condition or biochemical indicia associated with a disease. Prophylaxis refers to administration to a subject who does not have a disease, to prevent the disease from occurring or minimize its effects if it does.

[0221] A “hematological malignancy” includes a lymphoma, leukemia, myeloma or a lymphoid malignancy, as well as a cancer of the spleen and the lymph nodes. Exemplary lymphomas include both B cell lymphomas and T cell lymphomas. B-cell lymphomas include both Hodgkin's lymphomas and most non-Hodgkin's lymphomas. Non-limiting examples of B cell lymphomas include diffuse large B-cell lymphoma, follicular lymphoma, mucosa-associated lymphatic tissue lymphoma, small cell lymphocytic lymphoma (overlaps with chronic lymphocytic leukemia), mantle cell lymphoma (MCL), Burkitt's lymphoma, mediastinal large B cell lymphoma, Waldenström macroglobulinemia, nodal marginal zone B cell lymphoma, splenic marginal zone lymphoma, intravascular large B-cell lymphoma, primary effusion lymphoma, lymphomatoid granulomatosis. Non-limiting examples of T cell lymphomas include extranodal T cell lymphoma, cutaneous T cell lymphomas, anaplastic large cell lymphoma, and angioimmunoblastic T cell lymphoma. Hematological malignancies also include leukemia, such as, but not limited to, secondary leukemia, chronic lymphocytic leukemia, acute myelogenous leukemia, chronic myelogenous leukemia, and acute lymphoblastic leukemia. Hematological malignancies further include myelomas, such as, but not limited to, multiple myeloma and smoldering multiple myeloma. Other hematological and/or B cell- or T-cell-associated cancers are encompassed by the term hematological malignancy.

[0222] The term “effective dose” or “effective dosage” is defined as an amount sufficient to achieve or at least partially achieve a desired effect. A “therapeutically effective amount” or “therapeutically effective dosage” of a drug or therapeutic agent is any amount of the drug that, when used alone or in combination with another therapeutic agent, promotes disease regression evidenced by a decrease in severity of disease symptoms, an increase in frequency and duration of disease symptom-free periods, or a prevention of impairment or disability due to the disease affliction. In reference to solid tumors, an effective amount comprises an amount sufficient to cause a tumor to shrink and/or to decrease the growth rate of the tumor (such as to suppress tumor growth) or to prevent or delay other unwanted cell proliferation. In certain embodiments, an effective amount is an amount sufficient to delay tumor development. In certain embodiments, an effective amount is an amount sufficient to prevent or delay tumor recurrence. An effective amount can be administered in one or more administrations. The effective amount of the drug or composition may: (i) reduce the number of cancer cells; (ii) reduce tumor size; (iii) inhibit, retard, slow to some extent and may stop cancer cell infiltration into peripheral organs; (iv) inhibit, i.e., slow to some extent and may stop, tumor metastasis; (v) inhibit tumor growth; (vi) prevent or delay occurrence and/or recurrence of tumor; and/or (vii) relieve to some extent one or more of the symptoms associated with the cancer. In one example, an “effective amount” is the amount of anti-CD73 antibody and the amount of an immuno-oncology agent, e.g., an anti-PD-1 antibody, in combination, clinically proven to affect a significant decrease in cancer or slowing of progression of cancer, such as an advanced solid tumor.

[0223] As used herein, the terms “fixed dose”, “flat dose” and “flat-fixed dose” are used interchangeably and refer to a dose that is administered to a patient without regard for the weight or body surface area (BSA) of the patient. The fixed or flat dose is therefore not provided as a mg/kg dose, but rather as an absolute amount of the agent (e.g., the anti-CD73 antibody and/or immuno-oncology agent).

[0224] As used herein, a “body surface area (BSA)-based dose” refers to a dose (e.g., of the anti-CD73 antibody and/or anti-PD-1 antibody) that is adjusted to the body-surface area (BSA) of the individual patient. A BSA-based dose may be provided as mg/kg body weight. Various calculations have been published to arrive at the BSA without direct measurement, the most widely used of which is the Du Bois formula (see Du Bois D, Du Bois E F (June 1916) Archives of Internal Medicine 17 (6): 863-71; and Verbraecken, J. et al. (April 2006). Metabolism—Clinical and Experimental 55 (4): 515-24). Other exemplary BSA formulas include the Mosteller formula (Mosteller R D. N Engl J Med., 1987; 317:1098), the Haycock formula (Haycock G B, et al., J Pediatr 1978, 93:62-66), the Gehan and George formula (Gehan E A, George S L, Cancer Chemother Rep 1970, 54:225-235), the Boyd formula (Current, J D (1998), The Internet Journal of Anesthesiology 2 (2); and Boyd, Edith (1935), University of Minnesota. The Institute of Child Welfare, Monograph Series, No. x. London: Oxford University Press), the Fujimoto formula (Fujimoto S, et al., Nippon Eiseigaku Zasshi 1968; 5:443-50), the Takahira formula (Fujimoto S, et al., Nippon Eiseigaku Zasshi 1968; 5:443-50), and the Schlich formula (Schlich E, et al., Ernährungs Umschau 2010; 57:178-183).

[0225] As used herein, an “immuno-oncology agent” refers to an agent that stimulates or enhances or upregulates an immune response in a human subject, and includes, e.g., antagonists of inhibitory receptors on immune cells, e.g., T cells, and agonists of stimulatory receptors on immune cells, e.g., T cells. Exemplary immuno-oncology agents are further described herein, e.g., under the section entitled “combination therapies.”

[0226] A “prophylactically effective amount” or a “prophylactically effective dosage” of a drug is an amount of the drug that, when administered alone or in combination with another therapeutic agent to a subject at risk of developing a disease or of suffering a recurrence of disease, inhibits the development or recurrence of the disease. The ability of a therapeutic or prophylactic agent to promote disease regression or inhibit the development or recurrence of the disease can be evaluated using a variety of methods known to the skilled practitioner, such as in human subjects during clinical trials, in animal model systems predictive of efficacy in humans, or by assaying the activity of the agent in in vitro assays.

[0227] By way of example, an anti-cancer agent is a drug that slows cancer progression or promotes cancer regression in a subject. In preferred embodiments, a therapeutically effective amount of the drug promotes cancer regression to the point of eliminating the cancer. “Promoting cancer regression” means that administering an effective amount of the drug, alone or in combination with an anti-neoplastic agent, results in a reduction in tumor growth or size, necrosis of the tumor, a decrease in severity of at least one disease symptom, an increase in frequency and duration of disease symptom-free periods, a prevention of impairment or disability due to the disease affliction, or otherwise amelioration of disease symptoms in the patient. Pharmacological effectiveness refers to the ability of the drug to promote cancer regression in the patient. Physiological safety refers to an acceptably low level of toxicity, or other adverse physiological effects at the cellular, organ and/or organism level (adverse effects) resulting from administration of the drug.

[0228] By way of example for the treatment of tumors, a therapeutically effective amount or dosage of the drug preferably inhibits cell growth or tumor growth by at least about 20%, more preferably by at least about 40%, even more preferably by at least about 60%, and still more preferably by at least about 80% relative to untreated subjects. In the most preferred embodiments, a therapeutically effective amount or dosage of the drug completely inhibits cell growth or tumor growth, i.e., preferably inhibits cell growth or tumor growth by 100%. The ability of a compound to inhibit tumor growth can be evaluated using the assays described infra. Alternatively, this property of a composition can be evaluated by examining the ability of the compound to inhibit cell growth, such inhibition can be measured in vitro by assays known to the skilled practitioner. In other preferred embodiments described herein, tumor regression may be observed and may continue for a period of at least about 20 days, more preferably at least about 40 days, or even more preferably at least about 60 days.

[0229] The terms “patient” and “subject” refer to any human or non-human animal that receives either prophylactic or therapeutic treatment. For example, the methods and compositions described herein can be used to treat a subject or patient having cancer, such as an advanced solid tumor. The term “non-human animal” includes all vertebrates, e.g., mammals and non-mammals, such as non-human primates, sheep, dog, cow, chickens, amphibians, reptiles, etc.

[0230] Various aspects described herein are described in further detail in the following subsections.

### I. Anti-CD73 Antibodies

[0231] Described herein are antibodies, e.g., fully human antibodies, which are characterized by particular functional features or properties and are useful, e.g., in the treatment of cancer when used in combination with an immuno-oncology agent. For example, the antibodies specifically bind human CD73. Additionally, antibodies may cross react with CD73 from one or more non-human primates, such as cynomolgus CD73.

[0232] In addition to binding specifically to soluble and/or membrane bound human CD73, the antibodies described herein exhibit one or more of the following functional properties:

[0233] (a) inhibition of CD73 enzymatic activity (soluble or membrane bound), resulting in a reduction of adenosine produced;

[0234] (b) binding to cyno CD73;

[0235] (c) antibody mediated CD73 internalization into cells, e.g., tumor cells; and

[0236] (d) binding to a conformational epitope comprising amino acids 65-83 and 157-172 of human CD73.

[0237] Preferably, anti-CD73 antibodies bind to human CD73 (dimeric and in some embodiments monomeric; isoform 1 or 2) with high affinity, for example, with a K_{D} of 10⁻⁷ M or less, 10⁻⁸ M or less, 10⁻⁹M or less, 10⁻¹⁰ M or less, 10⁻¹¹M or less, 10⁻¹² M or less, 10⁻¹² M to 10⁻⁷ M, 10⁻¹¹ M to 10⁻⁷ M, 10⁻¹⁰ M to 10⁻⁷ M, 10⁻⁹ M to 10⁻⁷ M, or 10⁻¹⁰ M to 10⁻⁸M. In certain embodiments, an anti-CD73 antibody binds to soluble human CD73, e.g, as determined by BIACORE® SPR analysis, with a K_{D} of 10⁻⁷ M or less, 10⁻⁸M or less, 10⁻⁹M (1 nM) or less, 10⁻¹° M or less, 10⁻¹² M to 10⁻⁷ M, 10⁻¹¹ M to 10⁻⁷ M, 10⁻¹⁰ M to 10⁻⁷ M, 10⁻⁹ M to 10⁻⁷ M, 10⁻⁸M to 10⁻⁷ M or 10⁻¹⁰ M to 10⁻⁸M. In certain embodiments, an anti-CD73 antibody binds to bound (e.g., cell membrane bound, e.g., Calu6 cells) human CD73, e.g., as determined as further described herein, with an EC50 of less than 1 nM. In certain embodiments, an anti-CD73 antibody binds to bound human CD73, e.g., cell membrane bound human CD73, e.g., as determined by flow cytometry and Scatchard plot, e.g., on human B cells or human Calu-6 cells, with a K_{D} of 10⁻⁷ M or less, 10⁻⁸M or less, 10⁻⁹ M (1 nM) or less, 10⁻¹⁰ M or less, 10⁻¹² M to 10⁻⁷ M, 10⁻¹¹ M to 10⁻⁸ M, 10⁻¹⁰ M to 10⁻⁸ M, 10⁻⁹ M to 10⁻⁸ M, 10⁻¹¹ M to 10⁻⁹ M, 10⁻¹⁰ M to 10⁻⁸ M, or 10⁻¹⁰ M to 10⁻⁹M. In certain embodiments, an anti-CD73 antibody binds to soluble human CD73 with a K_{D} of 10⁻⁷ M or less, 10⁻⁸ M or less, 10⁻⁹M (1 nM) or less, 10⁻¹⁰ M or less, 10⁻¹² M to 10⁻⁷ M, 10⁻¹¹ M to 10⁻⁷ M, 10⁻¹⁰ M to 10⁻⁷ M, 10⁻⁹ M to 10⁻⁷ M, 10⁻¹⁰ M to 10⁻⁸ M, or 10⁻⁸M to 10⁻⁷ M, and to bound human CD73, e.g., cell membrane bound human CD73, with a K_{D} or EC₅₀ of 10⁻⁷ M or less, 10⁻⁸M or less, 10⁻⁹ M (1 nM) or less, 10⁻¹⁰ M or less, 10⁻¹² M to 10⁻⁷ M, 10⁻¹¹ M to 10⁻⁸ M, 10⁻¹⁰ M to 10⁻⁸ M, 10⁻⁹ M to 10⁻⁸ M, 10⁻¹¹ M to 10⁻⁹ M, or 10⁻¹⁰ M to 10⁻⁹M.

[0238] An anti-CD73 Ab, such as an Ab described herein, may bind to human B cells, as determined by Scatchard, with a K_{D} of 0.1 nM or less, to human Calu-6 cells with a K_{D} of 1 nM or less and/or to cyno CD73-CHO cells with a K_{D} of 1 nM or less.

[0239] In certain embodiments, an anti-CD73 antibody binds to cyno CD73 with high affinity, e.g., it binds to a CHO cell expressing cyno CD73 with an EC50 of 0.1 nM to 10 nM, such as an EC50 of less than 1 nM, as determined, e.g., as further described herein.

[0240] In certain embodiments, anti-CD73 antibodies described herein also bind to cynomolgus CD73, e.g., bind to membrane bound cynomolgus CD73, e.g, to a CHO cell expressing cyno CD73 with an EC₅₀ of 100 nM or less, 10 nM or less, 1 nM or less, 100 nM to 0.01 nM, 100 nM to 0.1 nM, 100 nM to 1 nM, or 10 nM to 0.1 nM, as measured, e.g., in the Examples.

[0241] In certain embodiments, anti-CD73 antibodies are at least 90%, 95%, 98%, or 99% monomeric, as determined, e.g., by SEC. Anti-CD73 antibodies may also have biophysical characteristics that are similar to, or within the range of, those of the antibodies described herein.

[0242] In certain embodiments, anti-CD73 antibodies inhibit the enzymatic activity of human and/or cyno CD73, e.g., as determined in CD73 bead bound assays, or as determined in cells, e.g., Calu6, SKMEL24 or H292 cells, or as determined in an in vivo assay, e.g., a xenograft tumor model, e.g., as further described in the Examples. Anti-CD73 antibodies may have inhibitory activities that are at least similar to, or within the range of, those of the antibodies described herein. For example, anti-CD73 antibodies may inhibit human CD73 (e.g., CD73 bound to a solid) enzymatic activity (adenosine production) with an EC50 of less than 10 nM or less than 5 nM or in the range of 1 to 10 nM or 5 to 10 nM. Anti-CD73 antibodies may inhibit the activity of human CD73 on cells, e.g., Calu6 cells with an EC50 of less than 10 nM or less than 1 nM or in the range of 0.1 to 10 nM, 0.1 to 1 nM or 0.1 to 0.5 nM.

[0243] In certain embodiments, anti-CD73 antibodies are internalized (and mediate CD73 internalization) by a cell to which it binds as determined, e.g., in a high content internalization assay or by FACS or flow cytometry, as further described in the Examples. Anti-CD73 antibodies may have internalization characteristics (EC50, T_{1/2} and Ymax), and time to plateau that are at least similar to, or within the range of, those of the antibodies described in the Examples. In certain embodiments, an anti-CD73 antibody has a T_{1/2} of internalization that is less than 1 hour, such as less than 30 minutes, less than 15 minutes, less than 12 minutes, less than 10 minutes, less than 7 minutes or even less than 5 minutes in one or more cell lines, e.g, those set forth in the Examples, as determined, e.g., in a high content internalization assay (described in Example 6A). In certain embodiments, an anti-CD73 antibody reaches maximal anti-CD73 antibody mediated internalization within 10 hours or less, 6 hours or less, 5 hours or less, 4 hours or less, 3 hours or less, 2 hours or less, 1 hour or less, e.g., in the range of 10 minutes to 10 hours, 10 minutes to 6 hours, 1 hour to 10 hours or 1 hour to 6 hours, as determined, e.g., using a high content internalization assay, as described, e.g., in Example 6A, or using flow cytometry, as described, e.g., in Example 6B. The maximal level of anti-CD73 antibody mediated internalization of CD73 may be at least 50%, at least 60%, at least 70%, at least 80%, at least 90% or more, depending on the cell type. For example, the EC₅₀ of anti-CD73 antibody mediated internalization of CD73 in Calu6 cells, as measured in the high content internalization assay described in the Examples, may be less than 10 nM, e.g., from 0.1 to 10 nM or 1 to 10 nM or 1 to 5 nM and a Ymax of at least 90% or at least 95%.

[0244] In certain embodiments, anti-CD73 antibodies co-localize with endosomal markers following internalization into cells. For example, an anti-CD73 antibody, e.g., 11F11, co-localizes with endosomal markers EEA1, Rab7 and/or Lamp-1 in Calu-6 cells within 15 minutes, 30 minutes, 60 minutes and/or 120 minutes of contacting the cells with the anti-CD73 antibody.

[0245] Anti-CD73 antibodies, e.g., antibodies having an IgG2 hinge, IgG2 CH1 domain, or IgG2 hinge and IgG2 CH1 domain, may mediate the following CD73 internalization characteristics as measured in a high content internalization assay, e.g., as described in Example 6A:
[0246] EC₅₀ of 10 nM or less, 5 nM or less, 1 nM or less, or 0.1 to 10 nM or 0.1 to 1 nM; a Ymax (maximal percentage of internalization) of at least 90%, 95% or 98% in Calu6 cells and a T112 of less than 30 minutes or less than 10 minutes in Calu6 cells;
[0247] A T½ of less than 30 minutes or less than 10 minutes in human cells, e.g., Calu6 cells, HCC44 cells, H2030 cells, H2228 cells, HCC15 cells, SKLU1 cells, SKMES1 cells or SW900 cells.

[0248] Anti-CD73 antibodies, e.g., antibodies having an IgG2 hinge, IgG2 CH1 domain, or IgG2 hinge and IgG2 CH1 domain, may mediate the following CD73 internalization characteristics as measured by flow cytometry, e.g., as described in Example 6B:
[0249] A T_{1/2} of 1 hour or less and a Ymax of at least 70% in Calu6 cells;
[0250] A T_{1/2} of 30 minutes or less and a Ymax of at least 70% in NCI-H292 cells;
[0251] A T_{1/2} of 2 hours or less and a Ymax of at least 30% in SNUC1 cells; and/or
[0252] A T_{1/2} of 30 minutes or less and a Ymax of at least 60% in NCI-H1437 cells.

[0253] In certain embodiments, an anti-CD73 antibody is a bin1 antibody, i.e., it competes for binding to human CD73 with 11F11, but not with 4C3.

[0254] In certain embodiments, anti-CD73 antibodies bind to an epitope, e.g., a conformational epitope in the N-terminal portion of human CD73, e.g., an epitope located within amino acids 65-83 of human CD73 (SEQ ID NO:96), as determined, e.g., by HDX-MS, as further described in the Examples. In certain embodiments, anti-CD73 antibodies bind to amino acids 157-172 of human CD73 (SEQ ID NO: 97), or to an epitope located within amino acids 157-172, of human CD73 (SEQ ID NO: 97), as determined, e.g., by HDX-MS. Alternatively, anti-CD73 antibodies bind to an epitope, e.g., a discontinuous epitope in the N-terminal portion of human CD73, as determined, e.g., by HDX-MS.

[0255] In certain embodiments, anti-CD73 antibodies bind to amino acids 65 to 83 and amino acids 157-172 of human CD73, or to an epitope within amino acids 65 to 83 and amino acids 157-172, of human CD73 isoform 1 or 2, i.e., amino acid sequences FTKVQQIRRAEPNVLLLDA (SEQ ID NO: 96) and LYLPYKVLPVGDEVVG (SEQ ID NO: 97), as determined by, e.g., HDX-MS. In certain embodiments, the anti-CD73 antibodies bind to all or a portion of amino acids 65 to 83 and amino acids 157-172 of human CD73, as determined by, e.g., HDX-MS. In certain embodiments, anti-CD73 antibodies bind to both glycosylated and unglycosylated human CD73. In certain embodiments, anti-CD73 antibodies bind only to glycosylated CD73 and not to unglycosylated CD73.

[0256] Anti-CD73 antibodies may compete for binding to CD73 with (or inhibit binding of) anti-CD73 antibodies comprising CDRs or variable regions described herein, e.g., those of CD73.4-1, CD73.4-2, CD73.3, 11F11-1, 11F11-2, 4C3-1, 4C3-2, 4C3-3, 4D4, 10D2-1, 10D2-2, 11A6, 24H2, 5F8-1, 5F8-2, 6E11 and/or 7A11. In certain embodiments, anti-CD73 antibodies inhibit binding of CD73.4-1, CD73.4-2, CD73.3, 11F11, 4C3, 4D4, 10D2, 11A6, 24H2, 5F8, 6E11 and/or 7A11 to human CD73 by at least 10%, 20%, 30%, 40%, 50%, 60%, 70%, 80%, 90% or by 100%. In certain embodiments, CD73.4-1, CD73.4-2, CD73.3, 11F11-1, 11F11-2, 4C3-1, 4C3-2, 4C3-3, 4D4, 10D2-1, 10D2-2, 11A6, 24H2, 5F8-1, 5F8-2, 6E11 and/or 7A11 inhibit binding of anti-CD73 antibodies to human CD73 by at least 10%, 20%, 30%, 40%, 50%, 60%, 70%, 80%, 90% or by 100%. In certain embodiments, anti-CD73 antibodies inhibit binding of CD73.4-1, CD73.4-2, CD73.3, 11F11-1, 11F11-2, 4C3-1, 4C3-2, 4C3-3, 4D4, 10D2-1, 10D2-2, 11A6, 24H2, 5F8-1, 5F8-2, 6E11 and/or 7A11 to human CD73 by at least 10%, 20%, 30%, 40%, 50%, 60%, 70%, 80%, 90% or by 100% and CD73.4-1, CD73.4-2, CD73.3, 11F11-1, 11F11-2, 4C3-1, 4C3-2, 4C3-3, 4D4, 10D2-1, 10D2-2, 11A6, 24H2, 5F8-1, 5F8-2, 6E11 and/or 7A11 inhibit binding of the anti-CD73 antibodies to human CD73 by at least 10%, 20%, 30%, 40%, 50%, 60%, 70%, 80%, 90% or by 100% (e.g., compete in both directions). Competition experiments may be performed, e.g., as further described herein, e.g., in the Examples.

[0257] In certain embodiments, anti-CD73 antibodies inhibit CD73 enzymatic activity and/or are internalized in cells without requiring multivalent cross-linking, as determined, e.g., by the lack of requirement of FcR binding.

[0258] In certain embodiments, anti-CD73 antibodies have 1, 2, 3, 4, 5, 6, 7, 8, 9, 10, or 11 of the features listed in Table 3.

[0259] Table 3: Potential features of anti-CD73 antibodies
[0260] (1) binding to human CD73, e.g., bead bound human dimeric human CD73 isoform 1 and 2, e.g., with a K_{D} of 10 nM or less (e.g., 0.01 nM to 10 nM), e.g., as measured by BIACORE® SPR analysis;
[0261] (2) binding to membrane bound human CD73, e.g., with an EC₅₀ of 1 nM or less (e.g., 0.01 nM to 1 nM);
[0262] (3) binding to cynomolgus CD73, e.g., binding to membrane bound cynomolgus CD73, e.g, with an EC₅₀ of 10 nM or less (e.g., 0.01 nM to 10 nM);
[0263] (4) inhibition of human CD73 enzymatic activity, e.g., with an EC50 of 10 nM or less;
[0264] (5) inhibition of cyno CD73 enzymatic activity, e.g., with an EC50 of 10 nM or less;
[0265] (6) inhibition of endogenous (cellular) human CD73 enzymatic activity in Calu6 cells with an EC50 of 10 nM or less;
[0266] (7) inhibition of human CD73 enzymatic activity in vivo;
[0267] (8) internalization, e.g., antibody mediated (or dependent) CD73 internalization, into cells, e.g., with a T_{1/2} of less than 1 hour, 30 minutes or 10 minutes and/or a Ymax of at least 70%, 80% or 90%;
[0268] (9) binding to a conformational epitope on human CD73, e.g., a discontinuous epitope within the amino acid sequence (SEQ ID NO: 1) which includes all or a portion of amino acid residues FTKVQQIRRAEPNVLLLDA (SEQ ID NO: 96) and/or LYLPYKVLPVGDEVVG (SEQ ID NO: 97);
[0269] (10) competing in either direction or both directions for binding to human CD73 with CD73.4-1, CD73.4-2, CD73.3, 11F11-1, 11F11-2, 4C3-1, 4C3-2, 4C3-3, 4D4, 10D2-1, 10D2-2, 11A6, 24H2, 5F8-1, 5F8-2, 6E11 and/or 7A11; and
[0270] (11) interacting with human CD73 in a similar pattern as CD73.4, as determined by X-ray crystallography.

[0271] In certain embodiments an anti-CD73 antibody binds to soluble CD73, e.g., soluble human CD73 (e.g., soluble serum CD73). In certain embodiments an anti-CD73 antibody inhibits the enzymatic activity of soluble human CD73. In certain embodiments, an anti-CD73 antibody binds to membrane bound and soluble CD73 proteins, and optionally inhibit the enzymatic activity of membrane bound and soluble CD73 proteins. Binding to soluble human CD73 can be in the same K_{D} ranges as for membrane bound CD73, e.g., as further described herein. Inhibiting the enzymatic activity of soluble human CD73 can be in the same activity ranges as for membrane bound CD73, e.g., as further described herein.

[0272] An antibody activity that exhibits one or more of these functional properties (e.g., biochemical, immunochemical, cellular, physiological or other biological activities, or the like) as determined according to methodologies known to the art and described herein, will be understood to relate to a statistically significant difference in the particular activity relative to that seen in the absence of the antibody (e.g., or when a control antibody of irrelevant specificity is present). In certain embodiments, an anti-CD73 antibody disclosed herein decreases a measured parameter (e.g., tumor volume, tumor metastasis, adenosine levels, cAMP levels) by at least 10% of the measured parameter, more preferably by at least 20%, 30%, 40%, 50%, 60%, 70%, 80% or 90%, and in certain preferred embodiments, by greater than 92%, 94%, 95%, 97%, 98% or 99%. Conversely, an anti-CD73 antibody disclosed herein increases a measured parameter by at least 10%, such as by at least 20%, 30%, 40%, 50%, 60%, 70%, 80%, 90%, 95%, 100% (i.e. 2 fold), 3 fold, 5 fold, or 10 fold.

[0273] Standard assays to evaluate the binding ability of the antibodies toward CD73 of various species are known in the art, including for example, ELISAs, Western blots, and RIAs. Suitable assays are described in detail in the Examples. The binding kinetics (e.g., binding affinity) of the antibodies also can be assessed by standard assays known in the art, such as by BIACORE® SPR analysis. Assays to evaluate the effects of the antibodies on functional properties of CD73 (e.g., adenosine production, tumor growth and metastasis, T cell inhibition) are described in further detail infra and in the Examples.

[0274] In certain embodiments, anti-CD73 antibodies are not native antibodies or are not naturally-occurring antibodies. For example, anti-CD73 antibodies have post-translational modifications that are different from those of antibodies that are naturally occurring, such as by having more, less or a different type of post-translational modification.

[0275] In certain embodiments, anti-CD73 antibodies stimulate Teff (T effector) function and/or reduce Treg function, e.g., by removing CD73 from the T cell surface and/or by inhibiting its enzymatic activity.

[0276] In certain embodiments, anti-CD73 antibodies comprise at least an IgG2 hinge, and optionally also an IgG2 CH1 domain or fragment or derivative of the hinge and/or CH1 domain and the antibody has adopted isoform A (see, e.g., Allen et al. (2009) Biochemistry 48:3755). In certain embodiments, anti-CD73 antibodies comprise at least an IgG2 hinge, and optionally also an IgG2 CH1 domain or fragment or derivative of the hinge and/or CH1 domain and the antibody has adopted isoform B (see, e.g., Allen et al. (2009) Biochemistry 48:3755). In certain embodiments a composition comprises a mixture of anti-CD73 antibodies with isoform A and anti-CD73 antibodies with isoform B.

[0277] Provided herein are anti-human CD73 antibodies that (i) comprise a variable region that binds to a region on human CD73 that is similar to that bound by 11F11, but does not bind to a region that is similar to that bound by 4C3 (i.e., is a bin1 antibody); (ii) bind to dimeric human CD73 (e.g., soluble CD73) with a Kd of 10 nM or less; (iii) inhibit the enzymatic activity (conversion of AMP to adenosine) of human CD73, e.g., on cells, e.g., Calu6 cells, with an EC50 of less than 10 nM; and (iv) mediate antibody dependent CD73 internalization in cells, e.g., with a T½ of 1 hour or less (or 30 minutes or less, or 10 minutes or less), a Ymax of 50% or more (or 60% or more, 70% or more, 80% or more or 90% or more) in human cells, e.g., Calu6 cells, H2228 cells, HCC15 cells H2030 cells, SNUC1 cells. In certain embodiments, the antibodies comprise an IgG2 hinge or an IgG2 hinge and IgG2 CH1 domain. Provided herein are anti-human CD73 antibodies that (i) comprise a variable region that binds to a region on human CD73 that is similar to that bound by 11F11, but does not bind to a region that is similar to that bound by 4C3 (i.e., is a bin1 antibody); (ii) bind to dimeric human CD73 (e.g., soluble CD73) with a Kd of 10 nM or less, as determined by SPR (Biacore); (iii) inhibit the enzymatic activity (conversion of AMP to adenosine) of human CD73, e.g., on cells, e.g., Calu6 cells, with an EC50 of less than 10 nM; and (iv) mediate antibody dependent CD73 internalization in cells, e.g., with a T½ of 30 minutes or less, a Ymax of 80% or more in human Calu6, H2228, HCC15 or H2030 cells, as determined using the high content internalization assay described in Example 6A.

[0278] In preferred embodiments, an anti-CD73 antibody described herein is not significantly toxic. For example, an anti-CD73 antibody is not significantly toxic to an organ of a human, e.g., one or more of the liver, kidney, brain, lungs, and heart, as determined, e.g., in clinical trials. In certain embodiments, an anti-CD73 antibody does not significantly trigger an undesirable immune response, e.g., autoimmunity or inflammation.

### II. Exemplary Anti-CD73 Antibodies

### Variable Regions of Anti-CD73 Antibodies

[0279] Particular antibodies described herein are antibodies, e.g., monoclonal antibodies, having the CDR and/or variable region sequences of antibodies 11F11-1, 11F11-2, 4C3-1, 4C3-2, 4C3-3, 4D4, 10D2-1, 10D2-2, 11A6, 24H2, 5F8-1, 5F8-2, 6E11, 7A11, CD73.3-1, -2 or -3, CD73.4-1 and -2, CD73.4-2, CD73.5-1 and -2, CD73.6-1 and -2, CD73.7-1 and -2, CD73.8-1 and -2, CD73.9-1 and -2, CD73.10-1 and -2 and CD73.11, as well as antibodies having at least 80% identity (e.g., at least 85%, at least 90%, at least 95%, or at least 99% identity) to their variable region or CDR sequences. Table 4 sets forth the SEQ ID NOs of the CDRs of the VH and VL regions of each antibody, as well as that of the VH and VL regions. As further described in the Examples, certain heavy chains can exist with more than one light chain, and the SEQ ID NOs of the alternate light chains are also provided in the Table below.

TABLE 4

| | VH | | | | VL | | | |
|---|---|---|---|---|---|---|---|---|
| | CDR1 | CDR2 | CDR3 | VH | CDR1 | CDR2 | CDR3 | VL |
| 11F11-1 | 5 | 6 | 7 | 4 | 9 | 10 | 11 | 8 |
| 11F11-2 | 5 | 6 | 7 | 4 | 13 | 14 | 15 | 12 |
| 4C3-1 | 17 | 18 | 19 | 16 | 21 | 22 | 23 | 20 |
| 4C3-2 | 17 | 18 | 19 | 16 | 25 | 26 | 27 | 24 |
| 4C3-3 | 17 | 18 | 19 | 16 | 29 | 30 | 31 | 28 |
| 4D4-1 | 33 | 34 | 35 | 32 | 37 | 38 | 39 | 36 |
| 10D2-1 | 41 | 42 | 43 | 40 | 45 | 46 | 47 | 44 |
| 10D2-2 | 41 | 42 | 43 | 40 | 49 | 50 | 51 | 48 |
| 11A6-1 | 53 | 54 | 55 | 52 | 57 | 58 | 59 | 56 |
| 24H2-1 | 61 | 62 | 63 | 60 | 65 | 66 | 67 | 64 |
| 5F8-1 | 69 | 70 | 71 | 68 | 73 | 74 | 75 | 72 |
| 5F8-2 | 69 | 70 | 71 | 68 | 77 | 78 | 79 | 76 |
| 5F8-3 | 69 | 70 | 71 | 68 | 239 | 240 | 241 | 238 |
| 6E11-1 | 81 | 82 | 83 | 80 | 85 | 86 | 87 | 84 |
| 7A11-1 | 89 | 90 | 91 | 88 | 93 | 94 | 95 | 92 |
| 73.3 | 17 | 18 | 19 | 170 | 21 | 22 | 23 | 20 |
| 73.4-1 | 5 | 6 | 7 | 135 | 9 | 10 | 11 | 8 |
| 73.4-2 | 5 | 6 | 7 | 135 | 13 | 14 | 15 | 12 |
| 73.5-1 | 5 | 6 | 7 | 171 | 9 | 10 | 11 | 8 |
| 73.5-2 | 5 | 6 | 7 | 171 | 13 | 14 | 15 | 12 |
| 73.6-1 | 5 | 6 | 7 | 172 | 9 | 10 | 11 | 8 |
| 73.6-2 | 5 | 6 | 7 | 172 | 13 | 14 | 15 | 12 |
| 73.7-1 | 5 | 6 | 7 | 173 | 9 | 10 | 11 | 8 |
| 73.7-2 | 5 | 6 | 7 | 173 | 13 | 14 | 15 | 12 |
| 73.8-1 | 5 | 6 | 7 | 174 | 9 | 10 | 11 | 8 |
| 73.8-2 | 5 | 6 | 7 | 174 | 13 | 14 | 15 | 12 |
| 73.9-1 | 5 | 6 | 7 | 175 | 9 | 10 | 11 | 8 |
| 73.9-2 | 5 | 6 | 7 | 175 | 13 | 14 | 15 | 12 |
| 73.10-1 | 5 | 6 | 7 | 176 | 9 | 10 | 11 | 8 |
| 73.10-2 | 5 | 6 | 7 | 176 | 13 | 14 | 15 | 12 |
| 73.11 | 33 | 34 | 35 | 177 | 37 | 38 | 39 | 36 |

[0280] Provided herein are isolated antibodies, or antigen binding portion thereof, comprising heavy and light chain variable regions, wherein the heavy chain variable region comprises an amino acid sequence selected from the group consisting of SEQ ID NOs: 4, 16, 32, 40, 52, 60, 68, 80, 88, 135, and 170-177.

[0281] Also provided are isolated antibodies, or antigen binding portions thereof, comprising heavy and light chain variable regions, wherein the light chain variable region comprises an amino acid sequence selected from the group consisting of SEQ ID NOs: 8, 12, 20, 24, 28, 36, 44, 48, 56, 64, 72, 76, 84, 92 and 238.

[0282] Provided herein are isolated antibodies, or antigen-binding portion thereof, comprising:

[0283] (a) heavy and light chain variable region sequences comprising SEQ ID NOs: 135 and 8, respectively;

[0284] (b) heavy and light chain variable region sequences comprising SEQ ID NOs: 135 and 12, respectively;

[0285] (c) heavy and light chain variable region sequences comprising SEQ ID NOs: 4 and 8, respectively;

[0286] (d) heavy and light chain variable region sequences comprising SEQ ID NOs: 4 and 12, respectively;

[0287] (e) heavy and light chain variable region sequences comprising SEQ ID NOs: 16 and 20, respectively;

[0288] (f) heavy and light chain variable region sequences comprising SEQ ID NOs: 16 and 24, respectively;

[0289] (g) heavy and light chain variable region sequences comprising SEQ ID NOs: 16 and 28, respectively;

[0290] (h) heavy and light chain variable region sequences comprising SEQ ID NOs: 32 and 36, respectively;

[0291] (i) heavy and light chain variable region sequences comprising SEQ ID NOs: 40 and 44, respectively;

[0292] (j) heavy and light chain variable region sequences comprising SEQ ID NOs: 40 and 48, respectively;

[0293] (k) heavy and light chain variable region sequences comprising SEQ ID NOs: 52 and 56, respectively;

[0294] (l) heavy and light chain variable region sequences comprising SEQ ID NOs: 60 and 64, respectively;

[0295] (m) heavy and light chain variable region sequences comprising SEQ ID NOs: 68 and 72, respectively;

[0296] (n) heavy and light chain variable region sequences comprising SEQ ID NOs: 68 and 76, respectively;

[0297] (o) heavy and light chain variable region sequences comprising SEQ ID NOs: 68 and 238, respectively;

[0298] (p) heavy and light chain variable region sequences comprising SEQ ID NOs: 80 and 84, respectively;

[0299] (q) heavy and light chain variable region sequences comprising SEQ ID NOs: 88 and 92, respectively;

[0300] (r) heavy and light chain variable region sequences comprising SEQ ID NOs: 170 and 20, respectively;

[0301] (s) heavy and light chain variable region sequences comprising SEQ ID NOs: 170 and 24, respectively;

[0302] (t) heavy and light chain variable region sequences comprising SEQ ID NOs: 170 and 28, respectively;

[0303] (u) heavy and light chain variable region sequences comprising SEQ ID NOs: 171 and 8, respectively;

[0304] (v) heavy and light chain variable region sequences comprising SEQ ID NOs: 171 and 12, respectively;

[0305] (w) heavy and light chain variable region sequences comprising SEQ ID NOs: 172 and 8, respectively;

[0306] (x) heavy and light chain variable region sequences comprising SEQ ID NOs: 172 and 12, respectively;

[0307] (y) heavy and light chain variable region sequences comprising SEQ ID NOs: 173 and 8, respectively;

[0308] (z) heavy and light chain variable region sequences comprising SEQ ID NOs: 173 and 12, respectively;

[0309] (a2) heavy and light chain variable region sequences comprising SEQ ID NOs: 174 and 8, respectively;

[0310] (b2) heavy and light chain variable region sequences comprising SEQ ID NOs: 174 and 12, respectively;

[0311] (c2) heavy and light chain variable region sequences comprising SEQ ID NOs: 175 and 8, respectively;

[0312] (d2) heavy and light chain variable region sequences comprising SEQ ID NOs: 175 and 12, respectively;

[0313] (e2) heavy and light chain variable region sequences comprising SEQ ID NOs: 176 and 8, respectively;

[0314] (f2) heavy and light chain variable region sequences comprising SEQ ID NOs: 176 and 12, respectively; or

[0315] (g2) heavy and light chain variable region sequences comprising SEQ ID NOs: 177 and 36, respectively.

[0316] Anti-CD73 antibodies may comprise the heavy and light chain CDR1s, CDR2s and CDR3s of anti-CD73 antibodies described herein, e.g., CD73.4-1, CD73.4-2, CD73.3, 11F11-1, 11F11-2, 11F11, 4C3-1, 4C3-2, 4C3-3, 4D4, 10D2-1, 10D2-2, 11A6, 24H2, 5F8-1, 5F8-2, 5F8-3, 6E11 and 7A11, or combinations thereof.

[0317] Given that each of these antibodies binds to CD73 and that antigen-binding specificity is provided primarily by the CDR1, 2 and 3 regions, the V_{H} CDR1, 2 and 3 sequences and V_{L} CDR1, 2 and 3 sequences can be “mixed and matched” (i.e., CDRs from different antibodies can be mixed and match, although each antibody must contain a V_{H} CDR1, 2 and 3 and a V_{L} CDR1, 2 and 3) to create other anti-CD73 binding molecules described herein. CD73 binding of such “mixed and matched” antibodies can be tested using the binding assays described above and in the Examples (e.g., ELISAs). Preferably, when V_{H} CDR sequences are mixed and matched, the CDR1, CDR2 and/or CDR3 sequence from a particular V_{H} sequence is replaced with a structurally similar CDR sequence(s). Likewise, when V_{L} CDR sequences are mixed and matched, the CDR1, CDR2 and/or CDR3 sequence from a particular V_{L} sequence preferably is replaced with a structurally similar CDR sequence(s). It will be readily apparent to the ordinarily skilled artisan that novel V_{H} and V_{L} sequences can be created by substituting one or more V_{H} and/or V_{L} CDR region sequences with structurally similar sequences from the CDR sequences disclosed herein for monoclonal antibodies CD73.4-1, CD73.4-2, 11F11-1, 11F11-2, 4C3-1, 4C3-2, 4C3-3, 4D4, 10D2-1, 10D2-2, 11A6, 24H2, 5F8-1, 5F8-2, 6E11 and/or 7A11. “Mixed and matched” antibodies having binding affinity, bioactivity and/or other properties equivalent or superior to the specific antibodies disclosed herein may be selected for use in the methods of the present invention.

[0318] Provided herein are isolated antibodies, or antigen binding portion thereof comprising:

[0319] (a) a heavy chain variable region CDR1 comprising an amino acid sequence selected from the group consisting of SEQ ID NOs: 5, 17, 33, 41, 53, 61, 69, 81, and 89;

[0320] (b) a heavy chain variable region CDR2 comprising an amino acid sequence selected from the group consisting of SEQ ID NOs: 6, 18, 34, 42, 54, 62, 70, 82, and 90;

[0321] (c) a heavy chain variable region CDR3 comprising an amino acid sequence selected from the group consisting of SEQ ID NOs: 7, 19, 35, 43, 55, 63, 71, 83, and 91;

[0322] (d) a light chain variable region CDR1 comprising an amino acid sequence selected from the group consisting of SEQ ID NOs: 9, 13, 21, 25, 29, 37, 45, 49, 57, 65, 73, 77, 85, and 93;

[0323] (e) a light chain variable region CDR2 comprising an amino acid sequence selected from the group consisting of SEQ ID NOs: 10, 14, 22, 26, 30, 38, 46, 50, 58, 66, 74, 78, 86, and 94; and

[0324] (f) a light chain variable region CDR3 comprising an amino acid sequence selected from the group consisting of SEQ ID NOs: 11, 15, 23, 27, 31, 39, 47, 51, 59, 67, 75, 79, 87, and 95;

[0325] wherein the antibody specifically binds to human CD73.

[0326] In certain embodiments, the antibody comprises heavy and light chain variable regions, wherein the heavy chain variable region CDR1, CDR2, and CDR3 regions comprise SEQ ID NOs: 5-7; 17-19; 33-35; 41-43; 53-55; 61-63; 69-71; 81-83; or 89-91;

[0327] wherein the antibody specifically binds to human CD73.

[0328] In certain embodiments, the antibody comprises heavy and light chain variable regions, wherein the light chain variable region CDR1, CDR2, and CDR3 regions comprise:
[0329] (a) SEQ ID NOs: 9-11; 13-15; 21-23; 25-27; 29-31; 37-39; 45-47; 49-51; 57-59; 65-67; 73-75; 77-79; 85-87; or 93-95;

[0330] wherein the antibody specifically binds to human CD73.

[0331] In certain embodiments, the antibody comprises heavy and light chain variable regions, wherein:

[0332] (a) the heavy chain variable region CDR1, CDR2, and CDR3 comprises SEQ ID NOs: 5-7, respectively, and the light chain variable region CDR1, CDR2, and CDR3 comprises SEQ ID NOs: 9-11, respectively;

[0333] (b) the heavy chain variable region CDR1, CDR2, and CDR3 comprises SEQ ID NOs: 5-7, respectively, and the light chain variable region CDR1, CDR2, and CDR3 comprises SEQ ID NOs: 13-15, respectively;

[0334] (c) the heavy chain variable region CDR1, CDR2, and CDR3 comprises SEQ ID NOs: 17-19, respectively, and the light chain variable region CDR1, CDR2, and CDR3 comprises SEQ ID NOs: 21-23, respectively;

[0335] (d) the heavy chain variable region CDR1, CDR2, and CDR3 comprises SEQ ID NOs: 17-19, respectively, and the light chain variable region CDR1, CDR2, and CDR3 comprises SEQ ID NOs: 25-27, respectively;

[0336] (e) the heavy chain variable region CDR1, CDR2, and CDR3 comprises SEQ ID NOs: 17-19, respectively, and the light chain variable region CDR1, CDR2, and CDR3 comprises SEQ ID NOs: 29-31, respectively;

[0337] (f) the heavy chain variable region CDR1, CDR2, and CDR3 comprises SEQ ID NOs: 33-35, respectively, and the light chain variable region CDR1, CDR2, and CDR3 comprises SEQ ID NOs: 37-39, respectively;

[0338] (g) the heavy chain variable region CDR1, CDR2, and CDR3 comprises SEQ ID NOs: 41-43, respectively, and the light chain variable region CDR1, CDR2, and CDR3 comprises SEQ ID NOs: 45-47, respectively;

[0339] (h) the heavy chain variable region CDR1, CDR2, and CDR3 comprises SEQ ID NOs: 41-43, respectively, and the light chain variable region CDR1, CDR2, and CDR3 comprises SEQ ID NOs: 49-51, respectively;

[0340] (i) the heavy chain variable region CDR1, CDR2, and CDR3 comprises SEQ ID NOs: 53-55, respectively, and the light chain variable region CDR1, CDR2, and CDR3 comprises SEQ ID NOs: 57-59, respectively;

[0341] (j) the heavy chain variable region CDR1, CDR2, and CDR3 comprises SEQ ID NOs: 61-63, respectively, and the light chain variable region CDR1, CDR2, and CDR3 comprises SEQ ID NOs: 65-67, respectively;

[0342] (k) the heavy chain variable region CDR1, CDR2, and CDR3 comprises SEQ ID NOs: 69-71, respectively, and the light chain variable region CDR1, CDR2, and CDR3 comprises SEQ ID NOs: 73-75, respectively;

[0343] (l) the heavy chain variable region CDR1, CDR2, and CDR3 comprises SEQ ID NOs: 69-71, respectively, and the light chain variable region CDR1, CDR2, and CDR3 comprises SEQ ID NOs: 77-79, respectively;

[0344] (m) the heavy chain variable region CDR1, CDR2, and CDR3 comprises SEQ ID NOs: 81-83, respectively, and the light chain variable region CDR1, CDR2, and CDR3 comprises SEQ ID NOs: 85-87, respectively; or

[0345] (n) the heavy chain variable region CDR1, CDR2, and CDR3 comprises SEQ ID NOs: 89-91, respectively, and the light chain variable region CDR1, CDR2, and CDR3 comprises SEQ ID NOs: 93-95, respectively;

[0346] wherein the antibody specifically binds to human CD73, and optionally has one or more of the characteristics listed in Table 3, e.g., the ability to inhibit dephosphorylation of AMP and to mediate receptor dependent CD73 internalization.

[0347] In certain embodiments, the antibody comprises heavy and light chain variable regions, wherein:

[0348] (a) the heavy chain variable region CDR1, CDR2, and CDR3 consist of SEQ ID NOs: 5-7, respectively, and the light chain variable region CDR1, CDR2, and CDR3 consist of SEQ ID NOs: 9-11, respectively;

[0349] (b) the heavy chain variable region CDR1, CDR2, and CDR3 consist of SEQ ID NOs: 5-7, respectively, and the light chain variable region CDR1, CDR2, and CDR3 consist of SEQ ID NOs: 13-15, respectively;

[0350] (c) the heavy chain variable region CDR1, CDR2, and CDR3 consist of SEQ ID NOs: 17-19, respectively, and the light chain variable region CDR1, CDR2, and CDR3 consist of SEQ ID NOs: 21-23, respectively;

[0351] (d) the heavy chain variable region CDR1, CDR2, and CDR3 consist of SEQ ID NOs: 17-19, respectively, and the light chain variable region CDR1, CDR2, and CDR3 consist of SEQ ID NOs: 25-27, respectively;

[0352] (e) the heavy chain variable region CDR1, CDR2, and CDR3 consist of SEQ ID NOs: 17-19, respectively, and the light chain variable region CDR1, CDR2, and CDR3 consist of SEQ ID NOs: 29-31, respectively;

[0353] (f) the heavy chain variable region CDR1, CDR2, and CDR3 consist of SEQ ID NOs: 33-35, respectively, and the light chain variable region CDR1, CDR2, and CDR3 consist of SEQ ID NOs: 37-39, respectively;

[0354] (g) the heavy chain variable region CDR1, CDR2, and CDR3 consist of SEQ ID NOs: 41-43, respectively, and the light chain variable region CDR1, CDR2, and CDR3 consist of SEQ ID NOs: 45-47, respectively;

[0355] (h) the heavy chain variable region CDR1, CDR2, and CDR3 consist of SEQ ID NOs: 41-43, respectively, and the light chain variable region CDR1, CDR2, and CDR3 consist of SEQ ID NOs: 49-51, respectively;

[0356] (i) the heavy chain variable region CDR1, CDR2, and CDR3 consist of SEQ ID NOs: 53-55, respectively, and the light chain variable region CDR1, CDR2, and CDR3 consist of SEQ ID NOs: 57-59, respectively;

[0357] (j) the heavy chain variable region CDR1, CDR2, and CDR3 consist of SEQ ID NOs: 61-63, respectively, and the light chain variable region CDR1, CDR2, and CDR3 consist of SEQ ID NOs: 65-67, respectively;

[0358] (k) the heavy chain variable region CDR1, CDR2, and CDR3 consist of SEQ ID NOs: 69-71, respectively, and the light chain variable region CDR1, CDR2, and CDR3 consist of SEQ ID NOs: 73-75, respectively;

[0359] (l) the heavy chain variable region CDR1, CDR2, and CDR3 consist of SEQ ID NOs: 69-71, respectively, and the light chain variable region CDR1, CDR2, and CDR3 consist of SEQ ID NOs: 77-79, respectively;

[0360] (m) the heavy chain variable region CDR1, CDR2, and CDR3 consist of SEQ ID NOs: 81-83, respectively, and the light chain variable region CDR1, CDR2, and CDR3 consist of SEQ ID NOs: 85-87, respectively; or

[0361] (n) the heavy chain variable region CDR1, CDR2, and CDR3 consist of SEQ ID NOs: 89-91, respectively, and the light chain variable region CDR1, CDR2, and CDR3 consist of SEQ ID NOs: 93-95, respectively;

[0362] wherein the antibody specifically binds to human CD73, and optionally has one or more of the characteristics listed in Table 3, e.g., the ability to inhibit dephosphorylation of AMP and to mediate receptor dependent CD73 internalization.

### Heavy Chain Constant Domains of Anti-CD73 Antibodies

[0363] The heavy chain constant region of anti-CD73 antibodies described herein may be of any isotype, e.g., IgG1, IgG2, IgG3 and IgG4, or combinations thereof and/or modifications thereof. An anti-CD73 antibody may have effector function or may have reduced or no effector function. In certain embodiments, anti-CD73 antibodies described herein comprise a modified heavy chain constant region that provides enhanced properties to the antibody. As shown in the Examples, anti-CD73 antibodies having an IgG2 hinge and optionally an IgG2 CH1 domain, such as those having the variable regions of the 11F11 antibody, are better and faster internalized relative to antibodies having the same variable region but with a non-IgG2 hinge or CH1, e.g., relative to antibodies having an IgG1 hinge or an IgG1 hinge and IgG1 CH1. For example an antibody comprising the variable regions of the 11F11 antibody and comprising an IgG2 hinge and optionally an IgG2 CH1 and an IgG1 CH2 and IgG1 CH3 domains, and whether with or without effector function, is more efficiently internalized into cells upon binding to CD73 on the cell membrane relative to the same antibody, but with an IgG1 hinge or an IgG1 hinge and IgG1 CH1 domain. As further shown herein, a CD73 antibody having an IgG2 hinge and the remainder of the antibody of an IgG1 isotype internalizes more efficiently than the same antibody wherein the hinge is of an IgG1 isotype. An antibody having, in addition to an IgG2 hinge, an IgG2 CH1 domain internalizes even more efficiently than the same antibody in which the CH1 domain is an IgG1 CH1 domain. As further shown herein, anti-CD73 antibodies with an IgG2 hinge and optionally IgG2 CH1 also form larger antibody/antigen complexes than antibodies having an IgG1 hinge or IgG1 hinge and IgG1 CH1. Increased internalization appears to correlate with increased antibody/antigen complex size. As further described in the Examples, enhanced internalization does not appear to be associated with a higher or lower affinity of the antibody. Accordingly, provided herein are anti-CD73 antibodies having a modified heavy chain constant region that mediates antibody mediated CD73 internalization, and wherein the antibody with the modified heavy chain constant region binds to CD73 with a similar affinity as the same antibody, but with a different heavy chain constant region.

[0364] In certain embodiments, a CD73 antibody comprises a modified heavy chain constant region that comprises a hinge of the IgG2 isotype (an “IgG2 hinge”) and a CH1, CH2 and CH3 domain. In certain embodiments, a modified heavy chain constant region comprises an IgG2 hinge and a CH1, CH2 and CH3 domain, wherein at least one of the CH1, CH2 and CH3 domains is not of the IgG2 isotype. In certain embodiments, a modified heavy chain constant region comprises a hinge of the IgG2 isotype, a CH1 of the IgG2 isotype, wherein at least one of the CH2 and CH3 domains is not of the IgG2 isotype. The IgG2 hinge may be a wildtype IgG2 hinge, e.g., a wildtype human IgG2 hinge (e.g., having SEQ ID NO:136) or a variant thereof, provided that the IgG2 hinge retains the ability to confer to the antibody an enhanced activity (e.g., increased internalization by a cell; enhanced inhibition of enzymatic activity; increased antagonist or blocking activity; the ability to form large antibody/antigen cross-linked complexes; increased ability to stimulate or enhance an immune response; and/or increased anti-proliferative or anti-tumor effect) relative to that of the same antibody that comprises a non-IgG2 hinge and optionally a non-IgG2 CH1 domain. In certain embodiments, an IgG2 hinge variant retains similar rigidity or stiffness to that of a wildtype IgG2 hinge. The rigidity of a hinge or an antibody can be determined, e.g., by computer modeling, electron microscopy, spectroscopy such as Nuclear Magnetic Resonance (NMR), X-ray crystallography (B-factors), or Sedimentation Velocity Analytical ultracentrifugation (AUC) to measure or compare the radius of gyration of antibodies comprising the hinge. A hinge or antibody may have similar or higher rigidity relative to another hinge if an antibody comprising the hinge has a value obtained from one of the tests described in the previous sentence that differs from the value of the same antibody with a different hinge, e.g., an IgG1 hinge, in less than 5%, 10%, 25%, 50%, 75%, or 100%. A person of skill in the art would be able to determine from the tests whether a hinge or an antibody has at least similar rigidity to that of another hinge or antibody, respectively, by interpreting the results of these tests. An exemplary human IgG2 hinge variant is an IgG2 hinge that comprises a substitution of one or more of the four cysteine residues (i.e., C219, C220, C226 and C229) with another amino acid. A cysteine may be replaced by a serine. An exemplary IgG2 hinge is a human IgG2 hinge comprising a C219X mutation or a C220X mutation, wherein X is any amino acid except cysteine. In a certain embodiments, an IgG2 hinge does not comprise both a C219X and a C220X substitution. In certain embodiments, an IgG2 hinge comprises C219S or C220S, but not both C219S and C220S. Other IgG2 hinge variants that may be used include human IgG2 hinges comprising a C220, C226 and/or C229 substitution, e.g., a C220S, C226S or C229S mutation (which may be combined with a C219S mutation). An IgG2 hinge may also be an IgG2 hinge in which a portion of the hinge is that of another isotype (i.e., it is a chimeric or hybrid hinge), provided that the rigidity of the chimeric hinge is at least similar to that of a wildtype IgG2 hinge. For example, an IgG2 hinge may be an IgG2 hinge in which the lower hinge (as defined in Table 2) is of an IgG1 isotype, and is, e.g., a wildtype IgG1 lower hinge.

[0365] A “hybrid” or “chimeric” hinge is referred to as being of a specific isotype if more than half of the consecutive amino acids of the hinge are from that isotype. For example, a hinge having an upper and middle hinge of IgG2 and the lower hinge of IgG1 is considered to be an IgG2 hybrid hinge.

[0366] In certain embodiments, a CD73 antibody comprises a modified heavy chain constant region that comprises an IgG2 hinge comprising one of the following hinges:

(SEQ ID NO: 348)
ERKCCVECPPCPAPPVAG;
(SEQ ID NO: 349)
ERKSCVECPPCPAPPVAG;
(SEQ ID NO: 350)
ERKCSVECPPCPAPPVAG;
(SEQ ID NO: 351)
ERKXCVECPPCPAPPVAG;
(SEQ ID NO: 352)
ERKCXVECPPCPAPPVAG;
(SEQ ID NO: 353)
ERKCCVECPPCPAPPVAGX;
(SEQ ID NO: 354)
ERKSCVECPPCPAPPVAGX;
(SEQ ID NO: 355)
ERKCSVECPPCPAPPVAGX;
(SEQ ID NO: 356)
ERKXCVECPPCPAPPVAGX;
(SEQ ID NO: 357)
ERKCXVECPPCPAPPVAGX;
(SEQ ID NO: 358)
ERKCCVECPPCPAPELLGG;
(SEQ ID NO: 359)
ERKSCVECPPCPAPELLGG;
(SEQ ID NO: 360)
ERKCCSVECPPCPAPELLGG;
(SEQ ID NO: 361)
ERKXCVECPPCPAPELLGG;
(SEQ ID NO: 362)
ERKCXVECPPCPAPELLGG;
(SEQ ID NO: 363)
ERKCCVECPPCPAPELLG;
(SEQ ID NO: 364)
ERKSCVECPPCPAPELLG;
(SEQ ID NO: 365)
ERKCCSVECPPCPAPELLG;
(SEQ ID NO: 366)
ERKXCVECPPCPAPELLG;
(SEQ ID NO: 367)
ERKCXVECPPCPAPELLG;
(SEQ ID NO: 368)
ERKCCVECPPCPAP;
(SEQ ID NO: 369)
ERKSCVECPPCPAP;
(SEQ ID NO: 370)
ERKCSVECPPCPAP;
(SEQ ID NO: 371)
ERKXCVECPPCPAP;
or
(SEQ ID NO: 372)
ERKCXVECPPCPAP,

[0367] wherein X is any amino acid, except a cysteine,

or any of the above sequences, in which 1-5, 1-3, 1-2 or 1 amino acid is inserted between amino acid residues CVE and CPP. In certain embodiments, THT or GGG is inserted.

[0368] In certain embodiments, the hinge comprises SEQ ID NO: 348, 349, 350, 351, or 352, wherein 1, 2, 3 or all 4 amino acids P233,V234, A235 and G237 (corresponding to the C-terminal 4 amino acids “PVAG” (SEQ ID NO: 373) are deleted or substituted with another amino acid, e.g., the amino acids of the C-terminus of the IgG1 hinge (ELLG (SEQ ID NO: 374) or ELLGG (SEQ ID NO: 375). In certain embodiments, the hinge comprises SEQ ID NO: 348, 349, 350, 351, or 352, wherein V234, A235 and G237 are deleted or substituted with another amino acid. In certain embodiments, the hinge comprises SEQ ID NO: 348, 349, 350, 351, or 352, wherein A235 and G237 are deleted or substituted with another amino acid. In certain embodiments, the hinge comprises SEQ ID NO: 348, 349, 350, 351, or 352, wherein G237 is deleted or substituted with another amino acid. In certain embodiments, the hinge comprises SEQ ID NO: 348, 349, 350, 351, or 352, wherein V234 and A235 are deleted or substituted with another amino acid. Substitution of PVAG (SEQ ID NO: 373) in an IgG2 with the corresponding amino acids of an IgG1 hinge, i.e., (ELLG (SEQ ID NO: 374) or ELLGG (SEQ ID NO: 375)) to obtain a hybrid hinge, e.g., shown above, provides a hinge having the advantages of an IgG2 hinge and the effector function of IgG1 hinges.

[0369] In certain embodiments, a modified heavy chain constant region comprises a hinge that consists of or consists essentially of one of the sequences shown above, e.g., any one of SEQ ID NOs: 348-372, and e.g., does not comprise additional hinge amino acid residues.

[0370] In certain embodiments, 1 or 1-2 or 1-3 amino acids are inserted between the hinge and CH2 domain, e.g., an additional glycine may be added.

[0371] In certain embodiments an anti-CD73 antibody comprises a modified heavy chain constant region comprising an IgG1 or IgG2 constant region, wherein the hinge comprises a deletion of 1-10 amino acids. As shown in the Examples, an IgG1 antibody lacking amino acid residues SCDKTHT (S219, C220, D221, K222, T223, H224 and T225; SEQ ID NO: 376) conferred antibody mediated CD73 internalization more effectively than the same antibody having a wildtype IgG1 constant region. Similarly, in the context of an IgG2 antibody, an IgG2 antibody lacking amino acid residues CCVE (C219, C220, V222, and E224; SEQ ID NO: 377) conferred antibody mediated CD73 internalization more effectively than the same antibody having a wildtype IgG1 constant region. Accordingly, provided herein are modified heavy chain constant region in which the hinge comprises a deletion of 1, 2, 3, 4, 5, 6, or 7 amino acid residues, selected from residues 5219, C220, D221, K222, T223, H224 and T225 for an IgG1 antibody, and residues C219, C220, V222, and E224 for an IgG2 antibody.

[0372] In certain embodiments, a modified heavy chain constant region comprises a CH1 domain that is a wildtype CH1 domain of the IgG1 or IgG2 isotype (“IgG1 CH1 domain” or “IgG2 CH1 domain,” respectively). CH1 domains of the isotypes IgG3 and IgG4 (“IgG3 CH1 domain and “IgG2 CH1 domain,” respectively) may also be used. A CH1 domain may also be a variant of a wildtype CH1 domain, e.g., a variant of a wildtype IgG1, IgG2, IgG3 or IgG4 CH1 domain. Exemplary variants of CH1 domains include A114C, T173C and/or C131, e.g., C131S.

[0373] A CH1 domain, e.g., an IgG2 CH1 domain, may comprise the substitution C131S, which substitution confers onto an IgG2 antibody or antibody having an IgG2 CH1 and hinge the B form (or conformation).

[0374] In certain embodiments, a modified heavy chain constant region comprises a CH1 domain that is of the IgG2 isotype. In certain embodiments, the CH1 domain is wildtype IgG2 CH1 domain, e.g., having the amino acid sequence: ASTKGPSVFPLAPCSRSTSESTAALGCLVKDYFPEPVTVSWNSGALTSGVHTFPAVLQSS GLYSLSSVVTVPSSNFGTQTYTCNVDHKPSNTKVDKTV (SEQ ID NO: 378). In certain embodiments, the CH1 domain is a variant of SEQ ID NO: 378 and comprises 1-10, 1-5, 1-2 or 1 amino acid substitutions or deletions relative to SEQ ID NO: 378. As further described in the Examples, it has been shown herein that an IgG2 CH1 domain or variants thereof confer enhanced or altered internalization properties to anti-CD73 antibodies relative to IgG1 antibodies and even more enhanced or altered internalization when the antibodies also comprise an IgG2 hinge. In certain embodiments, IgG2 CH1 variants do not comprise an amino acid substitution or deletion at one or more of the following amino acid residues: C131, R133, E137 and 5138, which amino acid residues are shown in bold and underlined in SEQ ID NO: 378 shown above. For example, a modified heavy chain constant region may comprise an IgG2 CH1 domain in which neither of R133, E137 and 5138 are substituted with another amino acid or are deteled or in which neither of C131, R133, E137 and 5138 are substituted with another amino acid or are deteled. In certain embodiments, C131 is substituted with another amino acid, e.g., C131S, which substitution triggers the antibody to adopt conformation B. Both conformation A and conformation B antibodies having modified heavy chain constant regions have been shown herein to have enhanced activities relative to the same antibody with an IgG1 constant region.

[0375] In certain embodiments, N192 and/or F193 (shown as italicized and underlined residues in SEQ ID NO: 378 shown above) are substituted with another amino acid, e.g., with the corresponding amino acids in IgG1, i.e., N192S and/or F193L.

[0376] In certain embodiments, one or more amino acid residues of an IgG2 CH1 domain are substituted with the corresponding amino acid residues in IgG4. For example, N192 may be N192S; F193 may be F193L; C131 may be C131K; and/or T214 may be T214R.

[0377] An antibody may comprise a modified heavy chain constant region comprising an IgG2 CH1 domain or variant thereof and IgG2 hinge or variant thereof. The hinge and CH1 domain may be a combination of any IgG2 hinge and IgG2 CH1 domain described herein. In certain embodiments, the IgG2 CH1 and hinge comprise the following amino acid sequence

(SEQ ID NO: 379)
ASTKGPSVFPLAPCSRSTSESTAALGCLVKDYFPEPVTVSWNSGALTSGVHTFPAVLQSS

[chemical structure]

or an amino acid sequence that differs therefrom in at most 1-10 amino acids. The amino acid variants are as described for the hinge and CH1 domains above.

[0378] In certain embodiments, antibodies comprise at least an IgG2 hinge, and optionally also an IgG2 CH1 domain or fragment or derivative of the hinge and/or CH1 domain and the antibody has adopted form (of conformation) A (see, e.g., Allen et al. (2009) Biochemistry 48:3755). In certain embodiments, anti-CD73 antibodies comprise at least an IgG2 hinge, and optionally also an IgG2 CH1 domain or fragment or derivative of the hinge and/or CH1 domain and the antibody has adopted form B (see, e.g., Allen et al. (2009) Biochemistry 48:3755).

[0379] In certain embodiments, a modified heavy chain constant region comprises a CH2 domain that is a wildtype CH2 domain of the IgG1, IgG2, IgG3 or IgG4 isotype (“IgG1 CH2 domain,” “IgG2 CH2 domain,” “IgG3 CH2 domain,” or “IgG4 CH2 domain,” respectively). A CH2 domain may also be a variant of a wildtype CH2 domain, e.g., a variant of a wildtype IgG1, IgG2, IgG3 or IgG4 CH2 domain. Exemplary variants of CH2 domains include variants that modulate a biological activity of the Fc region of an antibody, such as ADCC or CDC or modulate the half-life of the antibody or its stability. In one embodiment, the CH2 domain is a human IgG1 CH2 domain with an A330S and P331S mutation, wherein the CH2 domain has reduced effector function relative to the same CH2 mutation without the mutations. A CH2 domain may have enhanced effector function. CH2 domains may comprise one or more of the following mutations: SE (S267E), SELF (S267E/L328F), SDIE (S239D/I332E), SEFF and GASDALIE (G236A/S239D/A330L/1332E) and/or one or more mutations at the following amino acids: E233, G237, P238, H268, P271, L328 and A330. Other mutations are further set forth herein elsewhere.

[0380] In certain embodiments, a modified heavy chain constant region comprises a CH3 domain that is a wildtype CH3 domain of the IgG1, IgG2, IgG3 or IgG4 isotype (“IgG1 CH3 domain,” “IgG2 CH3 domain,” “IgG3 CH3 domain,” or “IgG4 CH3 domain,” respectively. A CH3 domain may also be a variant of a wildtype CH3 domain, e.g., a variant of a wildtype IgG1, IgG2, IgG3 or IgG4 CH3 domain. Exemplary variants of CH3 domains include variants that modulate a biological activity of the Fc region of an antibody, such as ADCC or CDC or modulate the half-life of the antibody or its stability.

[0381] In certain embodiments, a modified heavy chain constant region comprises a hinge of the IgG2 isotype and a CH1 region of the IgG2 isotype. The IgG2 hinge and CH1 may be wild type IgG2 hinge and CH1 or variants thereof, provided that they have the desired biological activity. In certain embodiments, a modified heavy chain constant region comprises an IgG2 hinge comprising the C219S mutation, and an IgG2 CH1, which may be wild type or comprise at most 1-10, 1-5, 1-3, 1-2 or 1 amino acid substitution, deletion or addition. The modified heavy chain constant region may further comprise a wild type or mutated CH2 and CH3 domains. For example, a CD73 antibody may comprise a heavy chain constant domain comprising an IgG2 CH1 domain, an IgG2 hinge, which may comprise C219S, and an IgG1 CH2 and CH3 domain, wherein the CH2 and CH3 domain may be effectorless, such as comprising mutations A330S and P331S.

[0382] Generally, variants of the CH1, hinge, CH2 or CH3 domains may comprise 1, 2, 3, 4, 5, 6, 7, 8, 9, 10 or more mutations, and/or at most 10, 9, 8, 7, 6, 5, 4, 3, 2 or 1 mutation, or 1-10 or 1-5 mutations, or comprise an amino acid sequence that is at least about 75%, 80%, 85%, 90%, 95%, 96%, 97%, 98%, or 99% identical to that of the corresponding wildtype domain (CH1, hinge, CH2, or CH3 domain, respectively), provided that the heavy chain constant region comprising the specific variant retains the necessary biological activity.

[0383] Table 5 sets forth exemplary human heavy chain constant regions comprising a human CH1, hinge, CH2 and/or CH3 domains, wherein each domain is either a wildtype domain or a variant thereof that provides the desired biological activity to the heavy chain constant region. An unfilled cell in Table 5 indicates that the domain is present or not, and if present can be of any isotype, e.g., IgG1, IgG2, IgG3 or IgG4. For example, an antibody comprising the heavy chain constant region 1 in Table 5 is an antibody that comprises a heavy chain constant region comprising at least an IgG2 hinge, and which may also comprise a CH1, CH2 and/or CH3 domain, and if present, which CH1, CH2 and/or CH3 domain is of an IgG1, IgG2, IgG3 or IgG4 isotype. As another example for understanding Table 5, an antibody comprising a heavy chain constant region 8 is an antibody comprising a heavy chain constant region comprising an IgG1 CH1 domain, and IgG2 hinge, an IgG1 CH2 domain, and which may or may not also comprise a CH3 domain, which is present, may be of an IgG1, IgG2, IgG3 or IgG4 isotype.

TABLE 5

| MHCCR* | CH1 | Hinge | CH2 | CH3 |
|---|---|---|---|---|
| 1 | | IgG2 | | |
| 2 | IgG1 | IgG2 | | |
| 3 | IgG2 | IgG2 | | |
| 4 | | IgG2 | IgG1 | |
| 5 | | IgG2 | IgG2 | |
| 6 | | IgG2 | | IgG1 |
| 7 | | IgG2 | | IgG2 |
| 8 | IgG1 | IgG2 | IgG1 | |
| 9 | IgG1 | IgG2 | IgG2 | |
| 10 | IgG2 | IgG2 | IgG1 | |
| 11 | IgG2 | IgG2 | IgG2 | |
| 12 | IgG1 | IgG2 | | IgG1 |
| 13 | IgG1 | IgG2 | | IgG2 |
| 14 | IgG2 | IgG2 | | IgG1 |
| 15 | IgG2 | IgG2 | | IgG2 |
| 16 | | IgG2 | IgG1 | IgG1 |
| 17 | | IgG2 | IgG1 | IgG2 |
| 18 | | IgG2 | IgG2 | IgG1 |
| 19 | | IgG2 | IgG2 | IgG2 |
| 20 | IgG1 | IgG2 | IgG1 | IgG1 |
| 21 | IgG1 | IgG2 | IgG1 | IgG2 |
| 22 | IgG1 | IgG2 | IgG2 | IgG1 |
| 23 | IgG1 | IgG2 | IgG2 | IgG2 |
| 24 | IgG2 | IgG2 | IgG1 | IgG1 |
| 25 | IgG2 | IgG2 | IgG1 | IgG2 |
| 26 | IgG2 | IgG2 | IgG2 | IgG1 |
| 27 | IgG2 | IgG2 | IgG2 | IgG2 |

*Modified heavy chain constant region

[0384] In certain embodiments, an antibody comprising a heavy chain constant region shown in Table 5 has an enhanced biological activity relative to the same antibody comprising a heavy chain constant region that does not comprise that specific heavy chain constant region or relative to the same antibody that comprises an IgG1 constant region.

[0385] In certain embodiments, a method for improving the biological activity of a CD73 antibody that comprises a non-IgG2 hinge and/or non-IgG2 CH1 domain comprises providing an anti-CD73 antibody that comprises a non-IgG2 hinge and/or a non-IgG2 CH1 domain, and replacing the non-IgG2 hinge and the non-IgG2 CH1 domain with an IgG2 hinge and an IgG2 CH1 domain, respectively. A method for improving the biological activity of a CD73 antibody that does not comprise a modified heavy chain constant region, may comprise providing an anti-CD73 antibody that does not comprise a modified heavy chain constant region, and replacing its heavy chain constant region with a modified heavy chain constant region.

[0386] Exemplary modified heavy chain constant regions that may be linked to anti-CD73 variable regions, e.g., those described herein, are provided in Table 6, which sets forth the identity of each of the domains.

TABLE 6

| Modified heavy | | | | | SEQ ID NO |
|---|---|---|---|---|---|
| chain constant | | | | | of whole |
| region | CH1 | Hinge | CH2 | CH3 | MHCCR |
| IgG1-IgG2- | IgG1 wildtype | IgG2/IgG1 | IgG1 wildtype | IgG1 wildtype | SEQ ID |
| IgG1f | SEQ ID NO: 98 | SEQ ID NO: 178 | SEQ ID NO: 137 | SEQ ID NO: 138 | NO: 180 |
| IgG1-IgG2- | IgG1 wildtype | IgG2 wildtype | IgG1 wildtype | IgG1 wildtype | SEQ ID |
| IgG1f2 | SEQ ID NO: 98 | SEQ ID NO: 136 | SEQ ID NO: 137 | SEQ ID NO: 138 | NO: 162 |
| IgG1-IgG2CS- | IgG1 wildtype | IgG2C219S/IgG1 | IgG1 wildtype | IgG1 wildtype | SEQ ID |
| IgG1f | SEQ ID NO: 98 | SEQ ID NO: 179 | SEQ ID NO: 137 | SEQ ID NO: 138 | NO: 181 |
| IgG1-IgG2CS- | IgG1 wildtype | IgG2 C219S | IgG1 wildtype | IgG1 wildtype | SEQ ID |
| IgG1f2 | SEQ ID NO: 98 | SEQ ID NO: 123 | SEQ ID NO: 137 | SEQ ID NO: 138 | NO: 163 |
| IgG2-IgG1f | IgG2 wildtype | IgG2/IgG1 | IgG1 wildtype | IgG1 wildtype | SEQ ID |
| | SEQ ID NO: 124 | SEQ ID NO: 178 | SEQ ID NO: 137 | SEQ ID NO: 138 | NO: 182 |
| IgG2-IgG1f2 | IgG2 wildtype | IgG2 wildtype | IgG1 wildtype | IgG1 wildtype | SEQ ID |
| | SEQ ID NO: 124 | SEQ ID NO: 136 | SEQ ID NO: 137 | SEQ ID NO: 138 | NO: 164 |
| IgG2CS-IgG1f | IgG2 wildtype | IgG2C219S/IgG1 | IgG1 wildtype | IgG1 wildtype | SEQ ID |
| | SEQ ID NO: 124 | SEQ ID NO: 179 | SEQ ID NO: 137 | SEQ ID NO: 138 | NO: 183 |
| IgG2CS-IgG1f2 | IgG2 wildtype | IgG2 C219S | IgG1 wildtype | IgG1 wildtype | SEQ ID |
| | SEQ ID NO: 124 | SEQ ID NO: 123 | SEQ ID NO: 137 | SEQ ID NO: 138 | NO: 165 |
| IgG1-IgG2- | IgG1 wildtype | IgG2 wildtype | IgG1 | IgG1 wildtype | SEQ ID |
| IgG1.1f | SEQ ID NO: 98 | SEQ ID NO: 136 | A330S/P331S | SEQ ID NO: 138 | NO: 166 |
| | | | SEQ ID NO: 125 | | |
| IgG1-IgG2CS- | IgG1 wildtype | IgG2 C219S | IgG1 | IgG1 wildtype | SEQ ID |
| IgG1.1f | SEQ ID NO: 98 | SEQ ID NO: 123 | A330S/P331S | SEQ ID NO: 138 | NO: 167 |
| | | | SEQ ID NO: 125 | | |
| IgG2-IgG1.1f | IgG2 wildtype | IgG2 wildtype | IgG1 | IgG1 wildtype | SEQ ID |
| | SEQ ID NO: 124 | SEQ ID NO: 136 | A330S/P331S | SEQ ID NO: 138 | NO: 168 |
| | | | SEQ ID NO: 125 | | |
| IgG2CS-IgG1.1f | IgG2 wildtype | IgG2 C219S | IgG1 | IgG1 wildtype | SEQ ID |
| | SEQ ID NO: 124 | SEQ ID NO: 123 | A330S/P331S | SEQ ID NO: 138 | NO: 169 |
| | | | SEQ ID NO: 125 | | |

[0387] In certain embodiments, an antibody comprises a modified heavy chain constant region comprising an IgG2 hinge comprising SEQ ID NO: 123, 136, 178, 179, or 348-372 or a variant thereof, such as an IgG2 hinge comprising an amino acid sequence that (i) differs from SEQ ID NO: 123, 136, 178, 179, or 348-372 in 1, 2, 3, 4 or 5 amino acids substitutions, additions or deletions; (ii) differs from SEQ ID NO: 123, 136, 178, 179, or 348-372 in at most 5, 4, 3, 2, or 1 amino acids substitutions, additions or deletions; (iii) differs from SEQ ID NO: 123, 136, 178, 179, or 348-372 in 1-5, 1-3, 1-2, 2-5 or 3-5 amino acids substitutions, additions or deletions and/or (iv) comprises an amino acid sequence that is at least about 75%, 80%, 85%, 90%, 95%, 96%, 97%, 98% or 99% identical to SEQ ID NO: 123, 136, 178, 179, or 348-372, wherein in any of (i)-(iv), an amino acid substitution may be a conservative amino acid substitution or a non-conservative amino acid substitution; and wherein the modified heavy chain constant region has an enhanced biological activity relative to that of another heavy chain constant region, e.g., a heavy chain constant region that comprises a non-IgG2 hinge or relative to the same modified heavy chain constant region that comprises a non-IgG2 hinge. For example, the hinge may be wildtype, or comprise a C219S, C220S or C219S and C220S substitutions.

[0388] In certain embodiments, an antibody comprises a modified heavy chain constant region comprising an IgG1 CH1 domain comprising SEQ ID NO: 98 or an IgG2 CH1 domain comprising SEQ ID NO: 124, or a variant of SEQ ID NO: 98 or 124, which variant (i) differs from SEQ ID NO: 98 or 124 in 1, 2, 3, 4 or 5 amino acids substitutions, additions or deletions; (ii) differs from SEQ ID NO: 98 or 124 in at most 5, 4, 3, 2, or 1 amino acids substitutions, additions or deletions; (iii) differs from SEQ ID NO: 98 or 124 in 1-5, 1-3, 1-2, 2-5 or 3-5 amino acids substitutions, additions or deletions and/or (iv) comprises an amino acid sequence that is at least about 75%, 80%, 85%, 90%, 95%, 96%, 97%, 98% or 99% identical to SEQ ID NO: 98 or 124, wherein in any of (i)-(iv), an amino acid substitution may be a conservative amino acid substitution or a non-conservative amino acid substitution; and wherein the modified heavy chain constant region has an enhanced biological activity relative to that of another heavy chain constant region, e.g., a heavy chain constant region that comprises a non-IgG2 hinge or non-IgG2 hinge and CH1 domain or relative to the same modified heavy chain constant region that comprises a non-IgG2 hinge or non-IgG2 hinge and CH1 domain. An IgG2 CH1 domain may comprise C131S or other mutations that causes an IgG2 hinge and CH1 containing antibody to adopt either an A or a B form.

[0389] In certain embodiments, an antibody comprises a modified heavy chain constant region comprising an IgG1 CH2 domain comprising SEQ ID NO: 137 or 125, or a variant of SEQ ID NO: 137 or 125, which variant (i) differs from SEQ ID NO: 137 or 125 in 1, 2, 3, 4 or 5 amino acids substitutions, additions or deletions; (ii) differs from SEQ ID NO: 137 or 125 in at most 5, 4, 3, 2, or 1 amino acids substitutions, additions or deletions; (iii) differs from SEQ ID NO: 137 or 125 in 1-5, 1-3, 1-2, 2-5 or 3-5 amino acids substitutions, additions or deletions and/or (iv) comprises an amino acid sequence that is at least about 75%, 80%, 85%, 90%, 95%, 96%, 97%, 98% or 99% identical to SEQ ID NO: 137 or 125, wherein in any of (i)-(iv), an amino acid substitution may be a conservative amino acid substitution or a non-conservative amino acid substitution; and wherein the modified heavy chain constant region has an enhanced biological activity relative to that of another heavy chain constant region, e.g., a heavy chain constant region that comprises a non-IgG2 hinge or relative to the same modified heavy chain constant region that comprises a non-IgG2 hinge.

[0390] In certain embodiments, an antibody comprises a modified heavy chain constant region comprising an IgG1 CH3 domain comprising SEQ ID NO: 138, or a variant of SEQ ID NO: 138, which variant (i) differs from SEQ ID NO: 138 in 1, 2, 3, 4 or 5 amino acids substitutions, additions or deletions; (ii) differs from SEQ ID NO: 138 in at most 5, 4, 3, 2, or 1 amino acids substitutions, additions or deletions; (iii) differs from SEQ ID NO: 138 in 1-5, 1-3, 1-2, 2-5 or 3-5 amino acids substitutions, additions or deletions and/or (iv) comprises an amino acid sequence that is at least about 75%, 80%, 85%, 90%, 95%, 96%, 97%, 98% or 99% identical to SEQ ID NO: 138, wherein in any of (i)-(iv), an amino acid substitution may be a conservative amino acid substitution or a non-conservative amino acid substitution; and wherein the modified heavy chain constant region has an enhanced biological activity relative to that of another heavy chain constant region, e.g., a heavy chain constant region that comprises a non-IgG2 hinge or relative to the same modified heavy chain constant region that comprises a non-IgG2 hinge.

[0391] Modified heavy chain constant regions may also comprise a combination of the CH1, hinge, CH2 and CH3 domains described above.

[0392] In certain embodiments, a CD73 antibody, e.g., comprising CDRs or variable regions of anti-CD73 antibodies described herein, comprises a modified heavy chain constant region comprising any one of SEQ ID NOs: 162-169, 180-183, 267-282, 300-347 and 391-454 or a variant of any one of SEQ ID NOs: 162-169, 180-183, 267-282, 300-347 and 391-454, which variant (i) differs from any one of SEQ ID NOs: 162-169, 180-183, 267-282, 300-347 and 391-454 in 1, 2, 3, 4, 5, 6, 7, 8, 9, 10 or more amino acids substitutions, additions or deletions; (ii) differs from any one of SEQ ID NOs: 162-169, 180-183, 267-282, 300-347 and 391-454 in at most 10, 9, 8, 7, 6, 5, 4, 3, 2, or 1 amino acids substitutions, additions or deletions; (iii) differs from any one of SEQ ID NOs: 162-169, 180-183, 267-282, 300-347 and 391-454 in 1-5, 1-3, 1-2, 2-5, 3-5, 1-10, or 5-10 amino acids substitutions, additions or deletions and/or (iv) comprises an amino acid sequence that is at least about 75%, 80%, 85%, 90%, 95%, 96%, 97%, 98% or 99% identical to any one of SEQ ID NOs: 162-169, 180-183, 267-282, 300-347 and 391-454, wherein the amino acid(s) that differ from those in any one of SEQ ID NOs: 162-169, 180-183, 267-282, 300-347 and 391-454, respectively, are not the amino acid residues that differ from those in the corresponding wildtype immunoglobulin sequences (i.e., IgG1, IgG2 or IgG4) (the variations do not occur at the specific modified amino acids in these sequences), and wherein in any of (i)-(iv), an amino acid substitution may be a conservative amino acid substitution or a non-conservative amino acid substitution; and wherein the modified heavy chain constant region has an enhanced biological activity relative to that of another heavy chain constant region, e.g., a heavy chain constant region that comprises a non-IgG2 hinge or non-IgG2 CH1 domain or relative to the same modified heavy chain constant region that comprises a non-IgG2 hinge and/or a non-IgG2 CH1 domain.

[0393] Modified heavy chain constant regions may have (i) similar, reduced or increased effector function (e.g., binding to an FcγR, e.g., FcγRIIB) relative to a wildtype heavy chain constant region and or (ii) similar, reduced or increased half-life (or binding to the FcRn receptor) relative to a wildtype heavy chain constant region.

[0394] The VH domain of an anti-CD73 antibody described herein may be linked to a heavy chain constant region described herein. For example, FIG. 18 shows the amino acid sequence of antibody CD73.4 wherein the heavy chain constant region is IgG2CS-IgG1.1f (SEQ ID NO:133 or 189). Also encompassed herein are antibodies comprising a heavy chain comprising an amino acid sequence that differs from that of CD73.4-IgG2CS-IgG1.1f (SEQ ID NO:133 or 189) in at most 1-30, 1-25, 1-20, 1-15, 1-10, 1-5, 1-4, 1-3, 1-2 or 1 amino acid (by substitution, addition or deletion) and/or that are at least 80%, 85%, 90%, 95%, 96%, 97%, 98% or 99% identical to the amino acid sequence of the heavy chain of CD73.4-IgG2CS-IgG1.1f (SEQ ID NO:133 or 189). For example, encompassed herein are antibodies comprising the heavy chain of CD73.4-IgG2CS-IgG1.1f (SEQ ID NO: 133 or 189), and wherein the C-terminal K or GK or PGK are deleted or are present. Other variants of CD73.4-IgG2CS-IgG1.1f (SEQ ID NO:133 or 189) include those having a heavy chain that is of a different allotype, and wherein, e.g., amino acids 356 and 358 are D and L, respectively. Variants include those having an additional cysteine mutated in the IgG2 hinge, e.g., C220 (or have C220S instead of C219S), and those that do not have the mutations A330S and/or P331S. Variants of CD73.4-IgG2CS-IgG1.1f (SEQ ID NO:133 or 189) preferably have at least similar biochemical properties and/or biological activities, e.g., efficiency of internalization, inhibition of CD73 enzymatic activity, affinity for human CD73, and binding to the same or similar epitope, relative to CD73.4-IgG2CS-IgG1.1f (SEQ ID NO:133 or 189).

[0395] In certain embodiments, the anti-CD73 antibodies, or antigen binding portions thereof, comprising, e.g., the CDRs or variable regions of anti-CD73 antibodies described herein, comprise any one of the constant regions described herein, e.g., constant regions comprising the amino acid sequences set forth in any one of SEQ ID NOs: 126, 127, 129, 130, 162-169, 180-183, 267-282, 300-347 and 391-454.

[0396] A light chain of an anti-CD73 antibody may comprise a light chain constant region comprising SEQ ID NO: 131, or a variant of SEQ ID NO: 131, which variant (i) differs from SEQ ID NO: 131 in 1, 2, 3, 4, 5, 6, 7, 8, 9, 10 or more amino acids substitutions, additions or deletions; (ii) differs from SEQ ID NO: 131 in at most 10, 9, 8, 7, 6, 5, 4, 3, 2, or 1 amino acids substitutions, additions or deletions; (iii) differs from SEQ ID NO: 131 in 1-5, 1-3, 1-2, 2-5, 3-5, 1-10, or 5-10 amino acids substitutions, additions or deletions and/or (iv) comprises an amino acid sequence that is at least about 75%, 80%, 85%, 90%, 95%, 96%, 97%, 98% or 99% identical to SEQ ID NO: 131, wherein in any of (i)-(iv), an amino acid substitution may be a conservative amino acid substitution or a non-conservative amino acid substitution. An exemplary CL mutation includes C124S.

[0397] Heavy and light chains comprising an amino acid sequence that is at least 99%, 98%, 97%, 96%, 95%, 90%, 85%, 80%, 75% or 70% identical to any of the heavy or light chains set forth in Table 37, as detailed herein (or their variable regions), may be used for forming anti-human CD73 antibodies having the desired characteristics, e.g., those further described herein. Exemplary variants are those comprising an allotypic variation, e.g., in the constant domain. Heavy and light chains comprising an amino acid sequence that differs in at most 1-30, 1-25, 1-20, 1-15, 1-10, 1-5, 1-4, 1-3, 1-2 or 1 amino acid (by substitution, addition or deletion) from any of the heavy or light chains set forth in Table 37, as described herein (or their variable regions), may be used for forming anti-human CD73 antibodies having the desired characteristics, e.g., those further described herein.

[0398] In various embodiments, the antibodies described above exhibit one or more, two or more, three or more, four or more, five or more, six or more, seven or more, eight or more, nine or more, ten, or all of the functional properties described herein, e.g., listed in Table 3.

[0399] Such antibodies include, for example, human antibodies, humanized antibodies, or chimeric antibodies.

[0400] In one embodiment, the anti-CD73 antibodies described herein bind to both glycosylated (e.g., N-linked or O-linked glycosylation) and unglycosylated human CD73. Certain anti-CD73 antibodies may bind to glycosylated, but not unglycosylated CD73 or to unglycosylated but not glycosylated CD73.

[0401] In one embodiment, the anti-CD73 antibodies described herein bind to a conformational epitope.

[0402] In one embodiment, the anti-CD73 antibodies described herein bind to amino acid residues within the following region of human CD73:
[0403] FTKVQQIRRAEPNVLLLDA (SEQ ID NO: 96) and
   corresponding to amino acid residues 65-83 of human CD73 (SEQ ID NO: 1 or 2), as determined by, e.g., HDX-MS.

[0404] In one embodiment, the anti-CD73 antibodies described herein bind to all or a portion of the following amino acid residues in human CD73: FTKVQQIRRAEPNVLLLDA (SEQ ID NO: 96), which corresponds to amino acid residues 65-83 of human CD73 (SEQ ID NO: 1 or 2), as determined by, e.g., HDX-MS.

[0405] In one embodiment, the anti-CD73 antibody described herein binds to amino acid residues within the following region of human CD73:

(SEQ ID NO: 97)
LYLPYKVLPVGDEVVG,

corresponding to amino acid residues 157-172 of human CD73 (SEQ ID NO: 1 or 2), as determined by, e.g., HDX-MS.

[0406] In one embodiment, the anti-CD73 antibody described herein binds to all or a portion of the following amino acid residues within human CD73: LYLPYKVLPVGDEVVG (SEQ ID NO: 97), which corresponds to amino acid residues 157-172 of human CD73 (SEQ ID NO: 1 or 2), as determined by, e.g., HDX-MS.

[0407] In one embodiment, the anti-CD73 antibody described herein binds to discontinuous amino acid residues within the following regions of human CD73 (SEQ ID NO: 1 or 2):

(SEQ ID NO: 96)
FTKVQQIRRAEPNVLLLDA
and
(SEQ ID NO: 97)
LYLPYKVLPVGDEVVG.

[0408] In one embodiment, the anti-CD73 antibody described herein binds to all or a portion of the discontinuous amino acid residues within the following regions of human CD73 (SEQ ID NO: 1 or 2): FTKVQQIRRAEPNVLLLDA (SEQ ID NO: 96) and LYLPYKVLPVGDEVVG (SEQ ID NO: 97), which correspond to amino acid residues 65-83 and 157-172 of human CD73 (SEQ ID NO: 1 or 2), as determined by, e.g., HDX-MS.

[0409] In certain embodiments, anti-CD73 antibodies have interactions with human CD73 that correspond to those shown in Table 30, as determined by X-ray crystallography. An antibody may share at least 50%, 60%, 70%, 80%, 90%, 95% or 99% of the interactions with human CD73 that are shown in Table 31.

### III. Antibodies Having Particular Germline Sequences

[0410] In certain embodiments, an anti-CD73 antibody comprises a heavy chain variable region from a particular germline heavy chain immunoglobulin gene and/or a light chain variable region from a particular germline light chain immunoglobulin gene.

[0411] As demonstrated herein, human antibodies specific for CD73 have been prepared that comprise a heavy chain variable region that is the product of or derived from a human germline VH 3-33 gene, VH 3-10 gene, VH 3-15 gene, VH 3-16, JH6b gene, VH 6-19 gene, VH 4-34 gene, and/or JH3b gene. Accordingly, provided herein are isolated monoclonal antibodies specific for human CD73, or antigen-binding portions thereof, comprising a heavy chain variable region that is the product of or derived from a human VH germline gene selected from the group consisting of: VH 3-33, VH 3-10, VH 3-15, VH 3-16, VH 6-19, and VH 4-34.

[0412] Human antibodies specific for CD73 have been prepared that comprise a light chain variable region that is the product of or derived from a human germline VK L6 gene, VK L18 gene, VK L15 gene, VK L20 gene, VK A27 gene, JK5 gene, JK4 gene, JK2 gene, and JK1 gene. Accordingly, provided herein are isolated monoclonal antibodies specific for human CD73, or antigen-binding portions thereof, comprising a light chain variable region that is the product of or derived from a human VK germline gene selected from the group consisting of: VK L6, VK L18, VK L15, VK L20, and VK A27.

[0413] Preferred antibodies described herein are those comprising a heavy chain variable region that is the product of or derived from one of the above-listed human germline VH genes and also comprising a light chain variable region that is the product of or derived from one of the above-listed human germline VK genes.

[0414] As used herein, a human antibody comprises heavy or light chain variable regions that are “the product of” or “derived from” a particular germline sequence if the variable regions of the antibody are obtained from a system that uses human germline immunoglobulin genes. Such systems include immunizing a transgenic mouse carrying human immunoglobulin genes with the antigen of interest or screening a human immunoglobulin gene library displayed on phage with the antigen of interest. A human antibody that is “the product of” or “derived from” a human germline immunoglobulin sequence can be identified as such by comparing the amino acid sequence of the human antibody to the amino acid sequences of human germline immunoglobulins and selecting the human germline immunoglobulin sequence that is closest in sequence (i.e., greatest % identity) to the sequence of the human antibody. A human antibody that is “the product of” or “derived from” a particular human germline immunoglobulin sequence may contain amino acid differences as compared to the germline sequence, due to, for example, naturally-occurring somatic mutations or intentional introduction of site-directed mutation. However, a selected human antibody typically is at least 90% identical in amino acids sequence to an amino acid sequence encoded by a human germline immunoglobulin gene and contains amino acid residues that identify the human antibody as being human when compared to the germline immunoglobulin amino acid sequences of other species (e.g., murine germline sequences). In certain cases, a human antibody may be at least 95%, or even at least 96%, 97%, 98%, or 99% identical in amino acid sequence to the amino acid sequence encoded by the germline immunoglobulin gene. Typically, a human antibody derived from a particular human germline sequence will display no more than 10 amino acid differences from the amino acid sequence encoded by the human germline immunoglobulin gene. In certain cases, the human antibody may display no more than 5, or even no more than 4, 3, 2, or 1 amino acid difference from the amino acid sequence encoded by the germline immunoglobulin gene.

### IV. Homologous Antibodies

[0415] Encompassed herein are antibodies having heavy and light chain variable regions comprising amino acid sequences that are homologous to the amino acid sequences of the preferred antibodies described herein, and wherein the antibodies retain the desired functional properties of the anti-CD73 antibodies described herein.

[0416] For example, an isolated anti-CD73 antibody, or antigen binding portion thereof, may comprise a heavy chain variable region and a light chain variable region, wherein:

[0417] (a) the heavy chain variable region comprises an amino acid sequence that is at least 80%, 85%, 90%, 95%, 96%, 97%, 98% or 99% identical to an amino acid sequence selected from the group consisting of SEQ ID NOs: 4, 16, 32, 40, 52, 60, 68, 80, 88, 135, and 170-177, or comprises 1, 2, 3, 4, 5, 1-2, 1-3, 1-4, 1-5, 1-10, 1-15, 1-20, 1-25, or 1-50 amino acid changes (i.e., amino acid substitutions, additions or deletions) relative to an amino acid sequence selected from the group consisting of SEQ ID NOs: 4, 16, 32, 40, 52, 60, 68, 80, 88, 135, and 170-177, respectively;

[0418] (b) the light chain variable region comprises an amino acid sequence that is at least 80%, 85%, 90%, 95%, 96%, 97%, 98% or 99% identical to an amino acid sequence selected from the group consisting of SEQ ID NOs: 8, 12, 20, 24, 28, 36, 44, 48, 56, 64, 72, 76, 84, 92, and 138, or comprises 1, 2, 3, 4, 5, 1-2, 1-3, 1-4, 1-5, 1-10, 1-15, 1-20, 1-25, or 1-50 amino acid changes (i.e., amino acid substitutions, additions or deletions) relative to an amino acid sequence selected from the group consisting of SEQ ID NOs: 8, 12, 20, 24, 28, 36, 44, 48, 56, 64, 72, 76, 84, 92, and 238, respectively;

[0419] (c) the antibody specifically binds to CD73, and

[0420] (d) the antibody exhibits 1, 2, 3, 4, 5, 6, 7, 8, 9, 10, or all of the functional properties listed in Table 3.

[0421] In certain embodiments, the anti-CD73 antibodies comprise heavy and light chain variable regions with the percent identities and/or amino acid changes and functions discussed above (i.e., (a)-(d)), wherein the CDR3 of the heavy chain variable region comprises an amino acid sequence selected from the group consisting of SEQ ID NOs: 7, 19, 35, 43, 55, 63, 71, 83, and 91, and optionally the CDR1 of the heavy chain variable region comprises an amino acid sequence selected from the group consisting of SEQ ID NOs: 5, 17, 33, 41, 53, 61, 69, 81, and 89, and optionally the CDR2 of the heavy chain variable region comprises an amino acid sequence selected from the group consisting of SEQ ID NOs: 6, 18, 34, 42, 54, 62, 70, 82, and 90.

[0422] In certain embodiments, the anti-CD73 antibodies comprise heavy and light chain variable regions with the percent identities and/or amino acid changes and functions discussed above (i.e., (a)-(d)), wherein the CDR3 of the light chain variable region comprises an amino acid sequence selected from the group consisting of SEQ ID NOs: 11, 15, 23, 27, 31, 39, 47, 51, 59, 67, 75, 79, 87, 95, and 241, and optionally the CDR1 of the light chain variable region comprises an amino acid sequence selected from the group consisting of SEQ ID NOs: 9, 13, 21, 25, 29, 37, 45, 49, 57, 65, 73, 77, 85, 93, and 239, and optionally the CDR2 of the light chain variable region comprises an amino acid sequence selected from the group consisting of SEQ ID NOs: 10, 14, 22, 26, 30, 38, 46, 50, 58, 66, 74, 78, 86, 94, and 240.

[0423] In certain embodiments, the anti-CD73 antibodies comprise heavy and light chain variable regions with the percent identities and/or amino acid changes and functions discussed above (i.e., (a)-(d)), wherein the CDR3 of the heavy chain variable region comprises an amino acid sequence selected from the group consisting of SEQ ID NOs: 7, 19, 35, 43, 55, 63, 71, 83, and 91, and optionally the CDR1 of the heavy chain variable region comprises an amino acid sequence selected from the group consisting of SEQ ID NOs: 5, 17, 33, 41, 53, 61, 69, 81, and 89, and optionally the CDR2 of the heavy chain variable region comprises an amino acid sequence selected from the group consisting of SEQ ID NOs: 6, 18, 34, 42, 54, 62, 70, 82, and 90, and wherein the CDR3 of the light chain variable region comprises an amino acid sequence selected from the group consisting of SEQ ID NOs: 11, 15, 23, 27, 31, 39, 47, 51, 59, 67, 75, 79, 87, 95, and 241, and optionally the CDR1 of the light chain variable region comprises an amino acid sequence selected from the group consisting of SEQ ID NOs: 9, 13, 21, 25, 29, 37, 45, 49, 57, 65, 73, 77, 85, 93, and 239, and optionally the CDR2 of the light chain variable region comprises an amino acid sequence selected from the group consisting of SEQ ID NOs: 10, 14, 22, 26, 30, 38, 46, 50, 58, 66, 74, 78, 86, 94, and 240.

[0424] In various embodiments, the antibody can be, for example, a human antibody, a humanized antibody or a chimeric antibody.

[0425] An isolated anti-CD73 antibody, or antigen binding portion thereof, may comprise a heavy chain and a light chain, wherein:

[0426] (a) the heavy chain comprises an amino acid sequence that is at least 80%, 85%, 90%, 95%, 96%, 97%, 98% or 99% identical to an amino acid sequence selected from the group consisting of SEQ ID NOs: 100, 103, 107, 109, 112, 114, 116, 119, 121, 133, 184-210 or comprises 1, 2, 3, 4, 5, 1-2, 1-3, 1-4, 1-5, 1-10, 1-15, 1-20, 1-25, or 1-50 amino acid changes (i.e., amino acid substitutions, additions or deletions) relative to an amino acid sequence selected from the group consisting of SEQ ID NOs: 100, 103, 107, 109, 112, 114, 116, 119, 121, 133, and 184-210, respectively;

[0427] (b) the light chain comprises an amino acid sequence that is at least 80%, 85%, 90%, 95%, 96%, 97%, 98% or 99% identical to an amino acid sequence selected from the group consisting of SEQ ID NOs: 101, 102, 104, 105, 106, 108, 110, 111, 113, 115, 117, 118, 120 and 122 or comprises 1, 2, 3, 4, 5, 1-2, 1-3, 1-4, 1-5, 1-10, 1-15, 1-20, 1-25, or 1-50 amino acid changes (i.e., amino acid substitutions, additions or deletions) relative to an amino acid sequence selected from the group consisting of SEQ ID NOs: 101, 102, 104, 105, 106, 108, 110, 111, 113, 115, 117, 118, 120 and 122, respectively;

[0428] (c) the antibody specifically binds to CD73, and

[0429] (d) the antibody exhibits 1, 2, 3, 4, 5, 6, 7, 8, 9, 10, or all of the functional properties listed in Table 3.

[0430] In certain embodiments, the anti-CD73 antibodies comprise heavy and light chains with the percent identities and/or amino acid changes and functions discussed above (i.e., (a)-(d)), wherein the CDR3 of the heavy chain variable region comprises an amino acid sequence selected from the group consisting of SEQ ID NOs: 7, 19, 35, 43, 55, 63, 71, 83, and 91, and optionally the CDR1 of the heavy chain variable region comprises an amino acid sequence selected from the group consisting of SEQ ID NOs: 5, 17, 33, 41, 53, 61, 69, 81, and 89, and optionally the CDR2 of the heavy chain variable region comprises an amino acid sequence selected from the group consisting of SEQ ID NOs: 6, 18, 34, 42, 54, 62, 70, 82, and 90.

[0431] In certain embodiments, the anti-CD73 antibodies comprise heavy and light chains with the percent identities and/or amino acid changes and functions discussed above (i.e., (a)-(d)), wherein the CDR3 of the light chain variable region comprises an amino acid sequence selected from the group consisting of SEQ ID NOs: 11, 15, 23, 27, 31, 39, 47, 51, 59, 67, 75, 79, 87, 95, and 241, and optionally the CDR1 of the light chain variable region comprises an amino acid sequence selected from the group consisting of SEQ ID NOs: 9, 13, 21, 25, 29, 37, 45, 49, 57, 65, 73, 77, 85, 93, and 239, and optionally the CDR2 of the light chain variable region comprises an amino acid sequence selected from the group consisting of SEQ ID NOs: 10, 14, 22, 26, 30, 38, 46, 50, 58, 66, 74, 78, 86, 94, and 240.

[0432] In certain embodiments, the anti-CD73 antibodies comprise heavy and light chains with the percent identities and/or amino acid changes and functions discussed above (i.e., (a)-(d)), wherein the CDR3 of the heavy chain variable region comprises an amino acid sequence selected from the group consisting of SEQ ID NOs: 7, 19, 35, 43, 55, 63, 71, 83, and 91, and optionally the CDR1 of the heavy chain variable region comprises an amino acid sequence selected from the group consisting of SEQ ID NOs: 5, 17, 33, 41, 53, 61, 69, 81, and 89, and optionally the CDR2 of the heavy chain variable region comprises an amino acid sequence selected from the group consisting of SEQ ID NOs: 6, 18, 34, 42, 54, 62, 70, 82, and 90, and wherein the CDR3 of the light chain variable region comprises an amino acid sequence selected from the group consisting of SEQ ID NOs: 11, 15, 23, 27, 31, 39, 47, 51, 59, 67, 75, 79, 87, 95, and 241, and optionally the CDR1 of the light chain variable region comprises an amino acid sequence selected from the group consisting of SEQ ID NOs: 9, 13, 21, 25, 29, 37, 45, 49, 57, 65, 73, 77, 85, 93, and 239, and optionally the CDR2 of the light chain variable region comprises an amino acid sequence selected from the group consisting of SEQ ID NOs: 10, 14, 22, 26, 30, 38, 46, 50, 58, 66, 74, 78, 86, 94, and 240.

[0433] Also provided are anti-CD73 antibodies comprising a VHCDR1, VHCDR2, VHCDR3, VLCDR1, VLCDR2, and/or VLCDR3 that differs from the corresponding CDRs of CD73.4-1, CD73.4-2, CD73.3, 11F11-1, 11F11-2, 4C3-1, 4C3-2, 4C3-3, 4D4, 10D2-1, 10D2-2, 11A6, 24H2, 5F8-1, 5F8-2, 6E11 and/or 7A11, in 1, 2, 3, 4, 5, 1-2, 1-3, 1-4, or 1-5 amino acid changes (i.e., amino acid substitutions, additions or deletions). In certain embodiments, an anti-CD73 antibody comprises 1-5 amino acid changes in each of 1, 2, 3, 4, 5 or 6 of the CDRs relative to the corresponding sequences in CD73.4-1, CD73.4-2, CD73.3, 11F11-1, 11F11-2, 11F11, 4C3-1, 4C3-2, 4C3-3, 4D4, 10D2-1, 10D2-2, 11A6, 24H2, 5F8-1, 5F8-2, 6E11 and/or 7A11. In certain embodiments, an anti-CD73 antibody comprises at total of 1-5 amino acid changes across all CDRs relative to the CDRs in CD73.4-1, CD73.4-2, CD73.3, 11F11-1, 11F11-2, 4C3-1, 4C3-2, 4C3-3, 4D4, 10D2-1, 10D2-2, 11A6, 24H2, 5F8-1, 5F8-2, 6E11 and/or 7A11.

[0434] In certain embodiments, an anti-CD73 antibody comprises VH and VL CDRs consisting of those of CD73.4-1 or CD73.4-2, wherein one or more of the amino acids in one or more CDRs are those of one of the other anti-CD73 antibodies disclosed herein.

[0435] Mutations (e.g., substitutions, additions, deletions) that can be made in the variable region sequences of the anti-CD73 antibodies can be determined based on the following: (i) the mutations that were introduced into the antibodies, as described in the Examples; and (ii) the comparison of the amino acid residues at each position in the variable domains of the anti-CD73 antibodies described herein (see Table 37 and FIG. 35): a different amino acid at a certain position in anti-CD73 antibodies may indicate that the amino acid residue at this position may be changed to another amino acid residue without significantly affecting the activities of the antibody; whereas if the same amino acid residue is found in the same position in several or all anti-CD73 antibodies, this may indicate that this particular amino acid should be preserved and not changed to another residue. Exemplary embodiments are provided below.

[0436] In certain embodiments, a framework substitution can be introduced at position 25 ( . . . RLSCATSGFTF . . . in 11F11) (SEQ ID NO: 469) of the heavy chain variable region (e.g., a conservative substitution, e.g., to S or A) of the anti-CD73 antibodies described herein. For example, if the amino acid at this position is T, a substitution to A or S can be introduced; if the amino acid at this position is A, a substitution to S or T can be introduced; and if the amino acid at this position is S, a substitution to T or A can be introduced. Antibodies 24H2, 4D4, 10D2, 6E11, 7A11, 11A6, and 4C3 have an A at this position, 11F11 has a T at this position, and 73.5, 73.7, and 73.9 have an S at this position.

[0437] Similarly, in certain embodiments, a framework substitution can be introduced at amino acid position 94 ( . . . AEDTAVYYCAR . . . in 11F11) (SEQ ID NO: 470) of the heavy chain variable region (e.g., V to L or L to V). For example, antibodies 11F11, 73.3-73.10, 24H2, 4D4, 5F8, and 10D2 have a V at this position, and 6E11, 7A11, 11A6, and 4C3 have an L at this position.

[0438] In certain embodiments, amino acid substitutions can be made to the heavy chain variable region CDR2 of the anti-CD73 antibodies disclosed herein. For example, the amino acid at position 52 ( . . . WVAVILYDGSN . . . in 11F11) (SEQ ID NO: 471) can be substituted with W, or if the amino acid at this position is W, then the amino acid can be substituted with L (antibodies 11F11 and 73.4-73.7 have an L at this position, and antibodies 73.8-73.10, 24H2, and 4D4 have a W at this position).

[0439] Similarly, in certain embodiments, the amino acid at position 54 ( . . . VILYDGSNKYY . . . in 11F11) (SEQ ID NO: 472) can be substituted with S or E, or if the amino acid at this position is S, then the amino acid can be substituted with E. Antibodies 11F11, 73.4, 73.5, 24H2, 10D2, and 5F8 have a G at this position, antibodies 73.6-73.9, 6E11, 7A11, 4C3, and 73.3 have a S at this position, and antibodies 73.10 and 4D4 have an E at this position.

[0440] Other permissible substitutions in the variable region can be determined based on the alignment of the heavy and light chain variable region sequences in FIG. 35 using a similar rationale as described above.

[0441] Antibodies having sequences with homology to those of CD73.3, CD73.4, CD73.5, CD73.6, CD73.7, CD73.8, CD73.9, CD73.10, CD73.11, 11F11, 4C3, 4D4, 10D2, 11A6, 24H2, 5F8, 6E11 and/or 7A11, e.g., the V_{H} and V_{L} regions of SEQ ID NOs: 4, 16, 32, 40, 52, 60, 68, 80, 88, 135, 170-177, and SEQ ID NOs: 8, 12, 20, 24, 28, 36, 44, 48, 56, 64, 72, 76, 84, 92, respectively, or heavy and light chains of SEQ ID NOs: 100, 103, 107, 109, 112, 114, 116, 119, 121, 133, and 184-210, and SEQ ID NOs: 101, 102, 104, 105, 106, 108, 110, 111, 113, 115, 117, 118, 120 and 122, respectively, or CDRs can be obtained by mutagenesis (e.g., site-directed or PCR-mediated mutagenesis) of nucleic acid molecules, e.g., SEQ ID NOs: 139, 142, 146, 148, 151, 153, 155, 158, 160, 237 and/or SEQ ID NOs: 140, 141, 143, 144, 145, 147, 149, 150, 152, 154, 156, 157, 159, 161 or SEQ ID NOs: 134, 243, 246, 250, 252, 255, 257, 259, 262, 264, and/or SEQ ID NOs: 244, 245, 247, 248, 249, 251, 253, 254, 256, 258, 260, 261, 263, 265, 266 followed by testing of the encoded altered antibody for retained function using the functional assays described herein.

V. Antibodies with Conservative Modifications

[0442] Anti-CD73 antibodies may comprise a heavy chain variable region comprising CDR1, CDR2 and CDR3 sequences and a light chain variable region comprising CDR1, CDR2 and CDR3 sequences, wherein one or more of these CDR sequences comprise specified amino acid sequences based on the preferred antibodies described herein e.g., of CD73.4-1, CD73.4-2, CD73.3, 11F11-1, 11F11-2, 4C3-1, 4C3-2, 4C3-3, 4D4, 10D2-1, 10D2-2, 11A6, 24H2, 5F8-1, 5F8-2, 6E11 and/or 7A11, or conservative modifications thereof, and wherein the antibodies retain the desired functional properties of the anti-CD73 antibodies described herein. Accordingly, an isolated anti-CD73 antibody, or antigen binding portion thereof, may comprise a heavy chain variable region comprising CDR1, CDR2, and CDR3 sequences and a light chain variable region comprising CDR1, CDR2, and CDR3 sequences, wherein:

[0443] (a) the heavy chain variable region CDR3 sequence comprises an amino acid sequence selected from the group consisting of amino acid sequences of SEQ ID NOs: 7, 19, 35, 43, 55, 63, 71, 83, and 91, and conservative modifications thereof, e.g., 1, 2, 3, 4, 5, 1-2, 1-3, 1-4 or 1-5 conservative amino acid substitutions;

[0444] (b) the light chain variable region CDR3 sequence comprises an amino acid sequence selected from the group consisting of amino acid sequence of SEQ ID NOs: 11, 15, 23, 27, 31, 39, 47, 51, 59, 67, 75, 79, 87, and 95, and conservative modifications thereof, e.g., 1, 2, 3, 4, 5, 1-2, 1-3, 1-4 or 1-5 conservative amino acid substitutions;

[0445] (c) the antibody specifically binds to CD73, and

[0446] (d) the antibody exhibits 1, 2, 3, 4, 5, 6, 7, 8, 9, 10, or all of the functional properties listed in Table 3.

[0447] In a preferred embodiment, the heavy chain variable region CDR2 sequence comprises an amino acid sequence selected from the group consisting of amino acid sequences of SEQ ID NOs: 6, 18, 34, 42, 54, 62, 70, 82, and 90, and conservative modifications thereof, e.g., 1, 2, 3, 4, 5, 1-2, 1-3, 1-4 or 1-5 conservative amino acid substitutions; and the light chain variable region CDR2 sequence comprises an amino acid sequence selected from the group consisting of amino acid sequences of SEQ ID NOs: 10, 14, 22, 26, 30, 38, 46, 50, 58, 66, 74, 78, 86, and 94, and conservative modifications thereof, e.g., 1, 2, 3, 4, 5, 1-2, 1-3, 1-4 or 1-5 conservative amino acid substitutions. In another preferred embodiment, the heavy chain variable region CDR1 sequence comprises an amino acid sequence selected from the group consisting of amino acid sequences of SEQ ID NOs: 5, 17, 33, 41, 53, 61, 69, 81, and 89, and conservative modifications thereof, e.g., 1, 2, 3, 4, 5, 1-2, 1-3, 1-4 or 1-5 conservative amino acid substitutions; and the light chain variable region CDR1 sequence comprises an amino acid sequence selected from the group consisting of amino acid sequences of SEQ ID NOs: 9, 13, 21, 25, 29, 37, 45, 49, 57, 65, 73, 77, 85, and 93, and conservative modifications thereof, e.g., 1, 2, 3, 4, 5, 1-2, 1-3, 1-4 or 1-5 conservative amino acid substitutions.

[0448] In various embodiments, the antibodies can be, for example, human antibodies, humanized antibodies or chimeric antibodies.

[0449] Conservative amino acid substitutions may also be made in portions of the antibodies other than, or in addition to, the CDRs. For example, conservative amino acid modifications may be made in a framework region or in the constant region, e.g., Fc region. Any of the substitutions described herein may be a conservative substitution. A variable region or a heavy or light chain may comprise 1, 2, 3, 4, 5, 1-2, 1-3, 1-4, 1-5, 1-10, 1-15, 1-20, 1-25, or 1-50 conservative amino acid substitutions relative to the anti-CD73 antibody sequences provided herein. In certain embodiments, an anti-CD73 antibody comprises a combination of conservative and non-conservative amino acid modification.

VI. Antibodies that Bind the Same Epitope on CD73 as or Compete for Binding to CD73 with the Antibodies Described Herein

[0450] Also provided are antibodies that compete for binding to CD73 with the particular anti-CD73 antibodies described herein (e.g., antibodies CD73.4, CD73.3, 11F11, 4C3, 4D4, 10D2, 11A6, 24H2, 5F8, 6E11 and 7A11). Such competing antibodies can be identified based on their ability to competitively inhibit binding to CD73 of one or more of monoclonal antibodies 11F11-1, 11F11-2, 4C3-1, 4C3-2, 4C3-3, 4D4, 10D2-1, 10D2-2, 11A6, 24H2, 5F8-1, 5F8-2, 6E11 7A11 and/or CD73.3 or CD73.4 (with any constant regions and light chains described herein for these antibodies) in standard CD73 binding assays. For example, standard ELISA assays or competitive ELISA assays can be used in which a recombinant human CD73 protein is immobilized on the plate, various concentrations of unlabeled first antibody are added, the plate is washed, labeled second antibody is added, washed, and the amount of bound label is measured. If the increasing concentration of the unlabeled (first) antibody (also referred to as the “blocking antibody”) inhibits the binding of the labeled (second) antibody, the first antibody is said to inhibit the binding of the second antibody to the target on the plate, or is said to compete with the binding of the second antibody. Additionally or alternatively, BIACORE® SPR analysis can be used to assess the ability of the antibodies to compete. The ability of a test antibody to inhibit the binding of an anti-CD73 antibody described herein to CD73 demonstrates that the test antibody can compete with the antibody for binding to CD73.

[0451] Also provided herein are anti-CD73 antibodies that inhibit the binding of anti-CD73 antibodies described herein to CD73 on cells, e.g., tumor cells, by at least 10%, 20%, 30%, 40%, 50%, 55%, 60%, 65%, 70%, 75%, 80%, 85%, 90%, 91%, 92%, 93%, 94%, 95%, 96%, 97%, 98%, 99%, or 100% and/or whose binding to CD73 on cells, e.g., tumor cells, is inhibited by at least 10%, 20%, 30%, 40%, 50%, 55%, 60%, 65%, 70%, 75%, 80%, 85%, 90%, 91%, 92%, 93%, 94%, 95%, 96%, 97%, 98%, 99%, or 100%, e.g., as measured by ELISA or FACS, such as by using the assay described in the preceding paragraph.

[0452] Antibodies that compete for binding with the anti-CD73 antibodies described herein may be identified by using art-known methods. For example, mice may be immunized with human CD73 as described herein, hybridomas produced, and the resulting monoclonal antibodies screened for the ability to compete with an antibody described herein for binding to CD73. Mice can also be immunized with a smaller fragment of CD73 containing the epitope to which the antibody binds. The epitope or region comprising the epitope can be identified by, e.g., screening for binding to a series of overlapping peptides spanning CD73. Alternatively, the method of Jespers et al., Biotechnology 12:899, 1994 may be used to guide the selection of antibodies having the same epitope and therefore similar properties to the an anti-CD73 antibody described herein. Using phage display, first the heavy chain of the anti-CD73 antibody is paired with a repertoire of (preferably human) light chains to select a CD73-binding antibody, and then the new light chain is paired with a repertoire of (preferably human) heavy chains to select a (preferably human) CD73-binding antibody having the same epitope or epitope region as an anti-CD73 antibody described herein. Alternatively variants of an antibody described herein can be obtained by mutagenesis of cDNA encoding the heavy and light chains of the antibody.

[0453] Techniques for determining antibodies that bind to the “same epitope on CD73” with the antibodies described herein include, for example, epitope mapping methods, such as x-ray analyses of crystals of antigen: antibody complexes, which provides atomic resolution of the epitope. Other methods monitor the binding of the antibody to antigen fragments or mutated variations of the antigen where loss of binding due to a modification of an amino acid residue within the antigen sequence is often considered an indication of an epitope component. In addition, computational combinatorial methods for epitope mapping can also be used. Methods may also rely on the ability of an antibody of interest to affinity isolate specific short peptides (either in native three dimensional form or in denatured form) from combinatorial phage display peptide libraries. The peptides are then regarded as leads for the definition of the epitope corresponding to the antibody used to screen the peptide library. For epitope mapping, computational algorithms have also been developed which have been shown to map conformational discontinuous epitopes.

[0454] Alanine scanning mutagenesis, as described by Cunningham and Wells (1989) Science 244: 1081-1085, or some other form of point mutagenesis of amino acid residues in CD73 may also be used to determine the functional epitope for an anti-CD73 antibody. Mutagenesis studies, however, may also reveal amino acid residues that are crucial to the overall three-dimensional structure of CD73 but that are not directly involved in antibody-antigen contacts, and thus other methods may be necessary to confirm a functional epitope determined using this method.

[0455] The epitope or epitope region (an “epitope region” is a region comprising the epitope or overlapping with the epitope) bound by a specific antibody may also be determined by assessing binding of the antibody to peptides comprising fragments of CD73, e.g., non-denatured or denatured fragments. A series of overlapping peptides encompassing the sequence of CD73 (e.g., human CD73) may be synthesized and screened for binding, e.g. in a direct ELISA, a competitive ELISA (where the peptide is assessed for its ability to prevent binding of an antibody to CD73 bound to a well of a microtiter plate), or on a chip. Such peptide screening methods may not be capable of detecting some discontinuous functional epitopes, i.e. functional epitopes that involve amino acid residues that are not contiguous along the primary sequence of the CD73 polypeptide chain.

[0456] An epitope may also be identified by MS-based protein footprinting, such as Hydrogen/deuterium exchange mass spectrometry (HDX-MS) and Fast Photochemical Oxidation of Proteins (FPOP). HDX-MS may be conducted, e.g., as further described in the Examples and in Wei et al. (2014) Drug Discovery Today 19:95, the methods of which are specifically incorporated by reference herein. FPOP may be conducted as described, e.g., in Hambley and Gross (2005) J. American Soc. Mass Spectrometry 16:2057, the methods of which are specifically incorporated by reference herein.

[0457] The epitope bound by anti-CD73 antibodies may also be determined by structural methods, such as X-ray crystal structure determination (e.g., WO2005/044853), molecular modeling and nuclear magnetic resonance (NMR) spectroscopy, including NMR determination of the H-D exchange rates of labile amide hydrogens in CD73 when free and when bound in a complex with an antibody of interest (Zinn-Justin et al. (1992) Biochemistry 31, 11335-11347; Zinn-Justin et al. (1993) Biochemistry 32, 6884-6891).

[0458] With regard to X-ray crystallography, crystallization may be accomplished using any of the known methods in the art (e.g. Giege et al. (1994) Acta Crystallogr. D 50:339-350; McPherson (1990) Eur. J. Biochem. 189:1-23), including microbatch (e.g. Chayen (1997) Structure 5:1269-1274), hanging-drop vapor diffusion (e.g. McPherson (1976) J. Biol. Chem. 251:6300-6303), seeding and dialysis. It is desirable to use a protein preparation having a concentration of at least about 1 mg/mL and preferably about 10 mg/mL to about 20 mg/mL. Crystallization may be best achieved in a precipitant solution containing polyethylene glycol 1000-20,000 (PEG; average molecular weight ranging from about 1000 to about 20,000 Da), preferably about 5000 to about 7000 Da, more preferably about 6000 Da, with concentrations ranging from about 10% to about 30% (w/v). It may also be desirable to include a protein stabilizing agent, e.g. glycerol at a concentration ranging from about 0.5% to about 20%. A suitable salt, such as sodium chloride, lithium chloride or sodium citrate may also be desirable in the precipitant solution, preferably in a concentration ranging from about 1 mM to about 1000 mM. The precipitant is preferably buffered to a pH of from about 3.0 to about 5.0, preferably about 4.0. Specific buffers useful in the precipitant solution may vary and are well-known in the art (Scopes, Protein Purification: Principles and Practice, Third ed., (1994) Springer-Verlag, N.Y.). Examples of useful buffers include, but are not limited to, HEPES, Tris, IVIES and acetate. Crystals may be grow at a wide range of temperatures, including 2° C., 4° C., 8° C. and 26° C.

[0459] Antibody:antigen crystals may be studied using well-known X-ray diffraction techniques and may be refined using computer software such as X-PLOR (Yale University, 1992, distributed by Molecular Simulations, Inc.; see e.g. Blundell & Johnson (1985) Meth. Enzymol. 114 & 115, H. W. Wyckoff et al., eds., Academic Press; U.S. Patent Application Publication No. 2004/0014194), and BUSTER (Bricogne (1993) Acta Cryst. D 49:37-60; Bricogne (1997) Meth. Enzymol. 276A:361-423, Carter & Sweet, eds.; Roversi et al. (2000) Acta Cryst. D 56:1313-1323), the disclosures of which are hereby incorporated by reference in their entireties.

[0460] Anti-CD73 antibodies may bind to the same epitope as any of the anti-CD73 antibodies having amino acid sequences described herein, as determined by an epitope mapping technique, such as a technique described herein. Anti-CD73 antibodies may also have similar interactions with human CD73, e.g., they may have at least about 50%, 60%, 70%, 80%, 90%, 95% or more of the interactions shown in Table 31, as determined by X-ray crystallography.

### VII. Engineered and Modified Antibodies

### VH and VL Regions

[0461] Also provided are engineered and modified antibodies that can be prepared using an antibody having one or more of the V_{H} and/or V_{L} sequences disclosed herein as starting material to engineer a modified antibody, which modified antibody may have altered properties from the starting antibody. An antibody can be engineered by modifying one or more residues within one or both variable regions (i.e., V_{H} and/or V_{L}), for example within one or more CDR regions and/or within one or more framework regions. Additionally or alternatively, an antibody can be engineered by modifying residues within the constant region(s), for example to alter the effector function(s) of the antibody.

[0462] One type of variable region engineering that can be performed is CDR grafting. Antibodies interact with target antigens predominantly through amino acid residues that are located in the six heavy and light chain complementarity determining regions (CDRs). For this reason, the amino acid sequences within CDRs are more diverse between individual antibodies than sequences outside of CDRs. Because CDR sequences are responsible for most antibody-antigen interactions, it is possible to express recombinant antibodies that mimic the properties of specific reference antibodies by constructing expression vectors that include CDR sequences from the specific reference antibody grafted onto framework sequences from a different antibody with different properties (see, e.g., Riechmann, L. et al. (1998) Nature 332:323-327; Jones, P. et al. (1986) Nature 321:522-525; Queen, C. et al. (1989) Proc. Natl. Acad. See. U.S.A. 86:10029-10033; U.S. Pat. No. 5,225,539 to Winter, and U.S. Pat. Nos. 5,530,101; 5,585,089; 5,693,762 and 6,180,370 to Queen et al.)

[0463] Accordingly, another embodiment described herein pertains to an isolated monoclonal antibody, or antigen binding portion thereof, comprising a heavy chain variable region comprising CDR1, CDR2, and CDR3 sequences comprising an amino acid sequence selected from the group consisting of SEQ ID NOs: 5, 17, 33, 41, 53, 61, 69, 81, and 89, SEQ ID NOs: 6, 18, 34, 42, 54, 62, 70, 82, and 90, and SEQ ID NOs: 7, 19, 35, 43, 55, 63, 71, 83, and 91, respectively, and a light chain variable region comprising CDR1, CDR2, and CDR3 sequences comprising an amino acid sequence selected from the group consisting of SEQ ID NOs: 9, 13, 21, 25, 29, 37, 45, 49, 57, 65, 73, 77, 85, and 93, SEQ ID NOs: 10, 14, 22, 26, 30, 38, 46, 50, 58, 66, 74, 78, 86, and 94, and SEQ ID NOs:11, 15, 23, 27, 31, 39, 47, 51, 59, 67, 75, 79, 87, and 95, respectively. Thus, such antibodies contain the V_{H} and V_{L} CDR sequences of monoclonal antibodies CD73.4-1, CD73.4-2, 11F11-1, 11F11-2, 4C3-1, 4C3-2, 4C3-3, 4D4, 10D2-1, 10D2-2, 11A6, 24H2, 5F8-1, 5F8-2, 6E11 and 7A11, yet may contain different framework sequences from these antibodies.

[0464] Such framework sequences can be obtained from public DNA databases or published references that include germline antibody gene sequences. For example, germline DNA sequences for human heavy and light chain variable region genes can be found in the “VBase” human germline sequence database (available on the Internet at www.mrc-cpe.cam.ac.uk/vbase), as well as in Kabat, E. A., et al. (1991) Sequences of Proteins of Immunological Interest, Fifth Edition, U.S. Department of Health and Human Services, NIH Publication No. 91-3242; Tomlinson, I. M., et al. (1992) “The Repertoire of Human Germline V_{H} Sequences Reveals about Fifty Groups of V_{H} Segments with Different Hypervariable Loops” J. Mol. Biol. 227:776-798; and Cox, J. P. L. et al. (1994) “A Directory of Human Germ-line V_{H} Segments Reveals a Strong Bias in their Usage” Eur. J. Immunol. 24:827-836; the contents of each of which are expressly incorporated herein by reference.

[0465] Preferred framework sequences for use in the antibodies described herein are those that are structurally similar to the framework sequences used by antibodies described herein. The V_{H} CDR1, 2 and 3 sequences, and the V_{L} CDR1, 2 and 3 sequences, can be grafted onto framework regions that have the identical sequence as that found in the germline immunoglobulin gene from which the framework sequence derive, or the CDR sequences can be grafted onto framework regions that contain up to 20, preferably conservative, amino acid substitutions as compared to the germline sequences. For example, it has been found that in certain instances it is beneficial to mutate residues within the framework regions to maintain or enhance the antigen binding ability of the antibody (see e.g., U.S. Pat. Nos. 5,530,101; 5,585,089; 5,693,762 and 6,180,370 to Queen et al).

[0466] Engineered antibodies described herein include those in which modifications have been made to framework residues within V_{H} and/or V_{L}, e.g. to improve the properties of the antibody. Typically such framework modifications are made to decrease the immunogenicity of the antibody. For example, one approach is to “backmutate” one or more framework residues to the corresponding germline sequence. More specifically, an antibody that has undergone somatic mutation may contain framework residues that differ from the germline sequence from which the antibody is derived. Such residues can be identified by comparing the antibody framework sequences to the germline sequences from which the antibody is derived. To return the framework region sequences to their germline configuration, the somatic mutations can be “backmutated” to the germline sequence by, for example, site-directed mutagenesis or PCR-mediated mutagenesis. Such “backmutated” antibodies are also intended to be encompassed. Another type of framework modification involves mutating one or more residues within the framework region, or even within one or more CDR regions, to remove T cell epitopes to thereby reduce the potential immunogenicity of the antibody. This approach is also referred to as “deimmunization” and is described in further detail in U.S. Patent Publication No. 20030153043 by Carr et al.

[0467] Another type of variable region modification is to mutate amino acid residues within the CDR regions to improve one or more binding properties (e.g., affinity) of the antibody of interest. Site-directed mutagenesis or PCR-mediated mutagenesis can be performed to introduce the mutation(s) and the effect on antibody binding, or other functional property of interest, can be evaluated in in vitro or in vivo assays as described herein and provided in the Examples. Preferably conservative modifications (as discussed above) are introduced. The mutations may be amino acid additions, deletions, or preferably substitutions. Moreover, typically no more than one, two, three, four or five residues within a CDR region are altered.

[0468] Accordingly, also provided are isolated anti-CD73 monoclonal antibodies, or antigen binding portions thereof, comprising a heavy chain variable region comprising: (a) a V_{H} CDR1 region comprising an amino acid sequence selected from the group consisting of SEQ ID NOs: 5, 17, 33, 41, 53, 61, 69, 81, and 89, or an amino acid sequence having one, two, three, four or five amino acid substitutions, deletions or additions as compared to SEQ ID NOs: 5, 17, 33, 41, 53, 61, 69, 81, and 89; (b) a V_{H} CDR2 region comprising an amino acid sequence selected from the group consisting of SEQ ID NOs: 6, 18, 34, 42, 54, 62, 70, 82, and 90, or an amino acid sequence having one, two, three, four or five amino acid substitutions, deletions or additions as compared to SEQ ID NOs: 6, 18, 34, 42, 54, 62, 70, 82, and 90; (c) a V_{H} CDR3 region comprising an amino acid sequence selected from the group consisting of SEQ ID NOs:7, 19, 35, 43, 55, 63, 71, 83, and 91, or an amino acid sequence having one, two, three, four or five amino acid substitutions, deletions or additions as compared to SEQ ID NOs: 7, 19, 35, 43, 55, 63, 71, 83, and 91; (d) a V_{L} CDR1 region comprising an amino acid sequence selected from the group consisting of SEQ ID NOs: 9, 13, 21, 25, 29, 37, 45, 49, 57, 65, 73, 77, 85, and 93, or an amino acid sequence having one, two, three, four or five amino acid substitutions, deletions or additions as compared to SEQ ID NOs: 9, 13, 21, 25, 29, 37, 45, 49, 57, 65, 73, 77, 85, and 93; (e) a V_{L} CDR2 region comprising an amino acid sequence selected from the group consisting of SEQ ID NOs: 10, 14, 22, 26, 30, 38, 46, 50, 58, 66, 74, 78, 86, and 94, or an amino acid sequence having one, two, three, four or five amino acid substitutions, deletions or additions as compared to SEQ ID NOs: 10, 14, 22, 26, 30, 38, 46, 50, 58, 66, 74, 78, 86, and 94; and (f) a V_{L} CDR3 region comprising an amino acid sequence selected from the group consisting of SEQ ID NOs: 11, 15, 23, 27, 31, 39, 47, 51, 59, 67, 75, 79, 87, and 95, or an amino acid sequence having one, two, three, four or five amino acid substitutions, deletions or additions as compared to SEQ ID NOs: 11, 15, 23, 27, 31, 39, 47, 51, 59, 67, 75, 79, 87, and 95.

[0469] Methionine residues in CDRs of antibodies can be oxidized, resulting in potential chemical degradation and consequent reduction in potency of the antibody. Accordingly, also provided are anti-CD73 antibodies that have one or more methionine residues in the heavy and/or light chain CDRs replaced with amino acid residues that do not undergo oxidative degradation.

[0470] Similarly, deamidation sites may be removed from anti-CD73 antibodies, particularly in the CDRs.

[0471] Potential glycosylation sites within the antigen binding domain are preferably eliminated to prevent glycosylation that may interfere with antigen binding. See, e.g., U.S. Pat. No. 5,714,350.

### Targeted Antigen Binding

[0472] In various embodiments, the antibody of the present invention is modified to selectively block antigen binding in tissues and environments where antigen binding would be detrimental, but allow antigen binding where it would be beneficial. In one embodiment, a blocking peptide “mask” is generated that specifically binds to the antigen binding surface of the antibody and interferes with antigen binding, which mask is linked to each of the binding arms of the antibody by a peptidase cleavable linker. See, e.g., U.S. Pat. No. 8,518,404 to CytomX. Such constructs are useful for treatment of cancers in which protease levels are greatly increased in the tumor microenvironment compared with non-tumor tissues. Selective cleavage of the cleavable linker in the tumor microenvironment allows disassociation of the masking/blocking peptide, enabling antigen binding selectively in the tumor, rather than in peripheral tissues in which antigen binding might cause unwanted side effects.

[0473] Alternatively, in a related embodiment, a bivalent binding compound (“masking ligand”) comprising two antigen binding domains is developed that binds to both antigen binding surfaces of the (bivalent) antibody and interfere with antigen binding, in which the two binding domains masks are linked to each other (but not the antibody) by a cleavable linker, for example cleavable by a peptidase. See, e.g., Int'l Pat. App. Pub. No. WO 2010/077643 to Tegopharm Corp. Masking ligands may comprise, or be derived from, the antigen to which the antibody is intended to bind, or may be independently generated. Such masking ligands are useful for treatment of cancers in which protease levels are greatly increased in the tumor microenvironment compared with non-tumor tissues. Selective cleavage of the cleavable linker in the tumor microenvironment allows disassociation of the two binding domains from each other, reducing the avidity for the antigen-binding surfaces of the antibody. The resulting dissociation of the masking ligand from the antibody enables antigen binding selectively in the tumor, rather than in peripheral tissues in which antigen binding might cause unwanted side effects.

### Fcs and Modified Fcs

[0474] In addition to the activity of a therapeutic antibody arising from binding of the antigen binding domain to the antigen (e.g. blocking of a cognate ligand or receptor protein in the case of antagonist antibodies, or induced signaling in the case of agonist antibodies), the Fc portion of the antibody interact with the immune system generally in complex ways to elicit any number of biological effects. Effector functions, such as The Fe region of an immunoglobulin is responsible for many important antibody functions, such as antigen-dependent cellular cytotoxicity (ADCC), complement dependent cytotoxicity (CDC), and antibody-dependent cell-mediated phagocytosis (ADCP), result in killing of target cells, albeit by different mechanisms.

[0475] Anti-CD73 antibodies may comprise the variable domains of the antibodies described herein with constant domains comprising different Fc regions, selected based on the biological activities (if any) of the antibody for the intended use. Salfeld (2007) Nat. Biotechnol 25:1369. Human IgGs, for example, can be classified into four subclasses, IgG1, IgG2, IgG3, and IgG4, and each these of these comprises an Fc region having a unique profile for binding to one or more of Fcγ receptors (activating receptors FcγRI (CD64), FcγRIIA, FcγRIIC (CD32); FcγRIIIA and FcγRIIIB (CD16) and inhibiting receptor FcγRIIB), and for the first component of complement (Clq). Human IgG1 and IgG3 bind to all Fcγ receptors; IgG2 binds to FcγRIIA_{H131}, and with lower affinity to FcγRIIA_{R131} FcγRIIIA_{V158}; IgG4 binds to FcγRI, FcγRIIA, FcγRIIB, FcγRIIC, and FcγRIIIA_{V158}; and the inhibitory receptor FcγRIIB has a lower affinity for IgG1, IgG2 and IgG3 than all other Fcγ receptors. Bruhns et al. (2009) Blood 113:3716. Studies have shown that FcγRI does not bind to IgG2, and FcγRIIIB does not bind to IgG2 or IgG4. Id. In general, with regard to ADCC activity, human IgG1 IgG3>>IgG4 IgG2. As a consequence, for example, an IgG1 constant domain, rather than an IgG2 or IgG4, might be chosen for use in a drug where ADCC is desired; IgG3 might be chosen if activation of FcγRIIIA-expressing NK cells, monocytes of macrophages; and IgG4 might be chosen if the antibody is to be used to desensitize allergy patients. IgG4 may also be selected if it is desired that the antibody lack all effector function.

[0476] Accordingly, anti-CD73 variable regions described herein may be linked (e.g., covalently linked or fused) to an Fc, e.g., an IgG1, IgG2, IgG3 or IgG4 Fc, which may be of any allotype or isoallotype, e.g., for IgG1: G1m, G1m1(a), G1m2(x), G1m3(f), G1m17(z); for IgG2: G2m, G2m23(n); for IgG3: G3m, G3m21(g1), G3m28(g5), G3m11(b0), G3m5(b1), G3m13(b3), G3m14(b4), G3m10(b5), G3m15(s), G3m16(t), G3m6(c3), G3m24(c5), G3m26(u), G3m27(v). See, e.g., Jefferis et al. (2009) mAbs 1:1). Selection of allotype may be influenced by the potential immunogenicity concerns, e.g. to minimize the formation of anti-drug antibodies.

[0477] Variable regions described herein may be linked to an Fc comprising one or more modifications, typically to alter one or more functional properties of the antibody, such as serum half-life, complement fixation, Fc receptor binding, and/or antigen-dependent cellular cytotoxicity. Furthermore, an antibody described herein may be chemically modified (e.g., one or more chemical moieties can be attached to the antibody) or it may be modified to alter its glycosylation, to alter one or more functional properties of the antibody. Each of these embodiments is described in further detail below. The numbering of residues in the Fc region is that of the EU index of Kabat. Sequence variants disclosed herein are provided with reference to the residue number followed by the amino acid that is substituted in place of the naturally occurring amino acid, optionally preceded by the naturally occurring residue at that position. Where multiple amino acids may be present at a given position, e.g. if sequences differ between naturally occurring isotypes, or if multiple mutations may be substituted at the position, they are separated by slashes (e.g. “X/Y/Z”).

[0478] For example, one may make modifications in the Fc region in order to generate an Fc variant with (a) increased or decreased antibody-dependent cell-mediated cytotoxicity (ADCC), (b) increased or decreased complement mediated cytotoxicity (CDC), (c) increased or decreased affinity for Clq and/or (d) increased or decreased affinity for a Fc receptor relative to the parent Fe. Such Fc region variants will generally comprise at least one amino acid modification in the Fc region. Combining amino acid modifications is thought to be particularly desirable. For example, the variant Fe region may include two, three, four, five, etc substitutions therein, e.g. of the specific Fc region positions identified herein. Exemplary Fc sequence variants are disclosed herein, and are also provided at U.S. Pat. Nos. 5,624,821; 6,277,375; 6,737,056; 6,194,551; 7,317,091; 8,101,720; PCT Patent Publications WO 00/42072; WO 01/58957; WO 04/016750; WO 04/029207; WO 04/035752; WO 04/074455; WO 04/099249: WO 04/06335 WO 05/070963: WO 05/040217, WO 05/092925 and WO 06/020114.

### Reducing Effector Function

[0479] ADCC activity may be reduced by modifying the Fc region. In certain embodiments, sites that affect binding to Fc receptors may be removed, preferably sites other than salvage receptor binding sites. In other embodiments, an Fc region may be modified to remove an ADCC site. ADCC sites are known in the art; see, for example, Sarmay et al. (1992) Molec. Immunol. 29 (5): 633-9 with regard to ADCC sites in IgG1. In one embodiment, the G236R and L328R variant of human IgG1 effectively eliminates FcγR binding. Horton et al. (2011) J. Immunol. 186:4223 and Chu et al. (2008) Mol. Immunol. 45:3926. In other embodiments, the Fc having reduced binding to FcγRs comprised the amino acid substitutions L234A, L235E and G237A. Gross et al. (2001) Immunity 15:289.

[0480] CDC activity may also be reduced by modifying the Fc region. Mutations at IgG1 positions D270, K322, P329 and P331, specifically alanine mutations D270A, K322A, P329A and P331A, significantly reduce the ability of the corresponding antibody to bind C1q and activate complement. Idusogie et al. (2000) J. Immunol. 164:4178; WO 99/51642. Modification of position 331 of IgG1 (e.g. P331S) has been shown to reduce complement binding. Tao et al. (1993) J. Exp. Med. 178:661 and Canfield & Morrison (1991) J. Exp. Med. 173:1483. In another example, one or more amino acid residues within amino acid positions 231 to 239 are altered to thereby reduce the ability of the antibody to fix complement. WO 94/29351.

[0481] In some embodiments, the Fc with reduced complement fixation has the amino acid substitutions A330S and P331S. Gross et al. (2001) Immunity 15:289.

[0482] For uses where effector function is to be avoided altogether, e.g. when antigen binding alone is sufficient to generate the desired therapeutic benefit, and effector function only leads to (or increases the risk of) undesired side effects, IgG4 antibodies may be used, or antibodies or fragments lacking the Fc region or a substantial portion thereof can be devised, or the Fc may be mutated to eliminate glycosylation altogether (e.g. N297A). Alternatively, a hybrid construct of human IgG2 (CH1 domain and hinge region) and human IgG4 (C_{H}2 and C_{H}3 domains) has been generated that is devoid of effector function, lacking the ability to bind the FcγRs (like IgG2) and unable to activate complement (like IgG4). Rother et al. (2007) Nat. Biotechnol. 25:1256. See also Mueller et al. (1997)Mol. Immunol. 34:441; Labrijn et al. (2008) Curr. Op. Immunol. 20:479 (discussing Fc modifications to reduce effector function generally).

[0483] In other embodiments, the Fc region is altered by replacing at least one amino acid residue with a different amino acid residue to reduce all effector function(s) of the antibody. For example, one or more amino acids selected from amino acid residues 234, 235, 236, 237, 297, 318, 320 and 322 can be replaced with a different amino acid residue such that the antibody has decreased affinity for an effector ligand but retains the antigen-binding ability of the parent antibody. The effector ligand to which affinity is altered can be, for example, an Fc receptor (residues 234, 235, 236, 237, 297) or the C1 component of complement (residues 297, 318, 320, 322). U.S. Pat. Nos. 5,624,821 and 5,648,260, both by Winter et al.

[0484] WO 88/007089 proposed modifications in the IgG Fc region to decrease binding to FcγRI to decrease ADCC (234A; 235E; 236A; G237A) or block binding to complement component C1q to eliminate CDC (E318A or V/K320A and K322A/Q). See also Duncan & Winter (1988) Nature 332:563; Chappel et al. (1991) Proc. Nat'l Acad. Sci. (USA) 88:9036; and Sondermann et al. (2000) Nature 406:267 (discussing the effects of these mutations on FcγRIII binding).

[0485] Fc modifications reducing effector function also include substitutions, insertions, and deletions at positions 234, 2.35, 236, 237, 267, 269, 325, and 328, such as 234G, 235G, 236R, 237K, 267R 269R, 325L, and 328R. An Fe variant may comprise 236R/328R Other modifications for reducing FcγR and complement interactions include substitutions 297A, 234A, 235A, 237A, 318A, 228P, 236E, 268Q, 309L, 330S, 331 S, 220S, 226S, 229S, 238S, 233P, and 234V. These and other modifications are reviewed in Strohl (2009) Current Opinion in Biotechnology 20:685-691. Effector functions (both ADCC and complement activation) can be reduced, while maintaining neonatal FcR binding (maintaining half-life), by mutating IgG residues at one or more of positions 233-236 and 327-331, such as E233P, L234V, L235A, optionally G2364, A327G, A330S and P331S in IgG1; E233P, F234V, L235A, optionally G236Δ in IgG4; and A330S and P331S in IgG2. See Armour et al. (1999) Eur. J. Immunol. 29:2613; WO 99/58572. Other mutations that reduce effector function include L234A and L235A in IgG1 (Alegre et al. (1994) Transplantation 57:1537); V234A and G237A in IgG2 (Cole et al. (1997) J. Immunol. 159:3613; see also U.S. Pat. No. 5,834,597); and S228P and L235E for IgG4 (Reddy et al. (2000) J. Immunol. 164:1925). Another combination of mutations for reducing effector function in a human IgG1 include L234F, L235E and P331S. Oganesyan et al. (2008) Acta Crystallogr. D. Biol. Crystallogr. 64:700. See generally Labrijn et gal. (2008) Curr. Op. Immunol. 20:479. Additional mutations found to decrease effector function in the context of an Fc (IgG1) fusion protein (abatacept) are C226S, C229S and P238S (EU residue numbering). Davis et al. (2007) J. Immunol. 34:2204.

[0486] Other Fc variants having reduced ADCC and/or CDC are disclosed at Glaesner et al. (2010) Diabetes Metab. Res. Rev. 26:287 (F234A and L235A to decrease ADCC and ADCP in an IgG4); Hutchins et al. (1995) Proc. Nat'l Acad. Sci. (USA) 92:11980 (F234A, G237A and E318A in an IgG4); An et al. (2009) MAbs 1:572 and U.S. Pat. App. Pub. 2007/0148167 (H268Q, V309L, A330S and P331S in an IgG2); McEarchern et al. (2007) Blood 109:1185 (C226S, C229S, E233P, L234V, L235A in an IgG1); Vafa et al. (2014) Methods 65:114 (V234V, G237A, P238S, H268A, V309L, A330S, P331S in an IgG2).

[0487] In certain embodiments, an Fc is chosen that has essentially no effector function, i.e., it has reduced binding to FcγRs and reduced complement fixation. An exemplary Fc, e.g., IgG1 Fc, that is effectorless comprises the following five mutations: L234A, L235E, G237A, A330S and P331S. Gross et al. (2001) Immunity 15:289. Exemplary heavy chains comprising these mutations are set forth in the Sequence Listing, as detailed at Table 37. These five substitutions may be combined with N297A to eliminate glycosylation as well.

### Enhancing Effector Function

[0488] Alternatively, ADCC activity may be increased by modifying the Fc region. With regard to ADCC activity, human IgG1≥IgG3>>IgG4≥IgG2, so an IgG1 constant domain, rather than an IgG2 or IgG4, might be chosen for use in a drug where ADCC is desired. Alternatively, the Fc region may be modified to increase antibody dependent cellular cytotoxicity (ADCC) and/or to increase the affinity for an Fey receptor by modifying one or more amino acids at the following positions: 234, 235, 236, 238, 239, 240, 241, 243, 244, 245, 247, 248, 249, 252, 254, 255, 256, 258, 262, 263, 264, 265, 267, 268, 269, 270, 272, 276, 278, 280, 283, 285, 286, 289, 290, 292, 293, 294, 295, 296, 298, 299, 301, 303, 305, 307, 309, 312, 313, 315, 320, 322, 324, 325, 326, 327, 329, 330, 331, 332, 333, 334, 335, 337, 338, 340, 360, 373, 376, 378, 382, 388, 389, 398, 414, 416, 419, 430, 433, 434, 435, 436, 437, 438 or 439. See WO 2012/142515; see also WO 00/42072. Exemplary substitutions include 236A, 239D, 239E, 268D, 267E, 268E, 268F, 3241, 332D, and 332E. Exemplary variants include 239D/332E, 236A/332E, 236A/239:D/332E, 268F/324T, 267E/268F, 267E/324T, and 267E/268F/324T. For example, human IgG1Fcs comprising the (3236A variant, which can optionally be combined with 1332E, have been shown to increase the FcγIIA/FcγIIB binding affinity ratio approximately 15-fold. Richards et al. (2008) Mol. Cancer Therap. 7:2517; Moore et al. (2010) mAbs 2:181. Other modifications for enhancing FcγR and complement interactions include but are not limited to substitutions 298A, 333A, 334A, 326A, 2471, 339D, 339Q, 280H, 290S, 298D, 298V, 243L, 292P, 300L, 396L, 305I, and 396L. These and other modifications are reviewed in Strohl (2009) Current Opinion in Biotechnology 20:685-691. Specifically, both ADCC and CDC may be enhanced by changes at position E333 of IgG1, e.g. E333A. Shields et al. (2001) J. Biol. Chem. 276:6591. The use of P2471 and A339D/Q mutations to enhance effector function in an IgG1 is disclosed at WO 2006/020114, and D280H, K290S S298D/V is disclosed at WO 2004/074455. The K326A1W and E333A/S variants have been shown to increase effector function in human IgG1, and E333S in IgG2. Idusogie et al. (2001) J. Immunol. 166:2571.

[0489] Specifically, the binding sites on human IgG1 for FcγR1, FcγRII, FcγRIII and FcRn have been mapped, and variants with improved binding have been described. Shields et al. (2001) J. Biol. Chem. 276:6591-6604. Specific mutations at positions 256, 290, 298, 333, 334 and 339 were shown to improve binding to FcγRIII, including the combination mutants T256A/S298A, S298A/E333A, S298A/K224A and S298A/E333A/K334A (having enhanced FcγRIIIa binding and ADCC activity). Other IgG1 variants with strongly enhanced binding to FcγRIIIa have been identified, including variants with S239D/I332E and S239D/1332E/A330L mutations which showed the greatest increase in affinity for FcγRIIIa, a decrease in FcγRIIb binding, and strong cytotoxic activity in cynomolgus monkeys. Lazar et al. (2006) Proc. Nat'l Acad Sci. (USA) 103:4005; Awan et al. (2010) Blood 115:1204; Desjarlais & Lazar (2011) Exp. Cell Res. 317:1278. Introduction of the triple mutations into antibodies such as alemtuzumab (CD52-specific), trastuzumab (HER2/neu-specific), rituximab (CD20-specific), and cetuximab (EGFR-specific) translated into greatly enhanced ADCC activity in vitro, and the S239D/I332E variant showed an enhanced capacity to deplete B cells in monkeys. Lazar et al. (2006) Proc. Nat'l Acad Sci. (USA) 103:4005. In addition, IgG1 mutants containing L235V, F243L, R292P, Y300L, V305I and P396L mutations which exhibited enhanced binding to FcγRIIIa and concomitantly enhanced ADCC activity in transgenic mice expressing human FcγRIIIa in models of B cell malignancies and breast cancer have been identified. Stavenhagen et al. (2007) Cancer Res. 67:8882; U.S. Pat. No. 8,652,466; Nordstrom et al. (2011) Breast Cancer Res. 13:R123.

[0490] Different IgG isotypes also exhibit differential CDC activity (IgG3>IgG1>>IgG2≈IgG4). Dangl et al. (1988) EMBO J. 7:1989. For uses in which enhanced CDC is desired, it is also possible to introduce mutations that increase binding to Clq. The ability to recruit complement (CDC) may be enhanced by mutations at K326 and/or E333 in an IgG2, such as K326W (which reduces ADCC activity) and E333S, to increase binding to Clq, the first component of the complement cascade. Idusogie et al. (2001) J. Immunol. 166:2571. Introduction of S267E/H268F/S324T (alone or in any combination) into human IgG1 enhances Clq binding. Moore et al. (2010) mAbs 2:181. The Fc region of the IgG1/IgG3 hybrid isotype antibody “113F” of Natsume et al. (2008) Cancer Res. 68:3863 (FIG. 1 therein) also confers enhanced CDC. See also Michaelsen et al. (2009) Scand. I Immunol. 70:553 and Redpath et al. (1998) Immunology 93:595.

[0491] Additional mutations that can increase or decrease effector function are disclosed at Dall' Acqua et al. (2006) J. Immunol. 177:1129. See also Carter (2006) Nat. Rev. Immunol. 6:343; Presta (2008) Curr Op. Immunol. 20:460.

[0492] Fc variants that enhance affinity for the inhibitory receptor FcγRIIb may also be used, e.g. to enhance apoptosis-inducing or adjuvant activity. Li & Ravetch (2011) Science 333:1030; Li & Ravetch (2012) Proc. Nat'l Acad. Sci (USA) 109:10966; U.S. Pat. App. Pub. 2014/0010812. Such variants may provide an antibody with immunomodulatory activities related to FcγRIIb⁺ cells, including for example B cells and monocytes. In one embodiment, the Fc variants provide selectively enhanced affinity to FcγRIIb relative to one or more activating receptors. Modifications for altering binding to FcγRIIb include one or more modifications at a position selected from the group consisting of 234, 235, 236, 237, 239, 266, 267, 268, 325, 326, 327; 328, and 332, according to the EU index. Exemplary substitutions for enhancing FcγRIIb affinity include but are not limited to 234D, 234E, 234F, 234W, 235D, 235F, 235R, 235Y, 236D, 236N, 237D, 237N, 239D, 239E, 266M, 267D, 267E, 268D, 268E, 327D, 327E, 328F, 328W, 328Y, and 332E. Exemplary substitutions include 235Y, 236D, 239D, 266M, 267E, 268D, 268E, 328F, 328W, and 328Y. Other Fc variants for enhancing binding to FcγRIIb include 235\7267E, 236D/267E, 239D/268D, 239D/267E, 267E/268D, 267E/268E, and 267E/328F. Specifically, the S267E, G236D, S239D, L328F and I332E variants, including the S267E+L328F double variant, of human IgG1 are of particular value in specifically enhancing affinity for the inhibitory FcγRIIb receptor. Chu et al. (2008)Mol. Immunol. 45:3926; U.S. Pat. App. Pub. 2006/024298; WO 2012/087928. Enhanced specificity for FcγRIIb (as distinguished from FcγRIIa^{R131}) may be obtained by adding the P238D substitution. Mimoto et al. (2013) Protein. Eng. Des. & Selection 26:589; WO 2012/115241.

[0493] In certain embodiments, the antibody is modified to increase its biological half-life. Various approaches are possible. For example, this may be done by increasing the binding affinity of the Fc region for FcRn. In one embodiment, the antibody is altered within the CH1 or CL region to contain a salvage receptor binding epitope taken from two loops of a CH2 domain of an Fc region of an IgG, as described in U.S. Pat. Nos. 5,869,046 and 6,121,022 by Presta et al. Other exemplary Fc variants that increase binding to FcRn and/or improve pharmacokinetic properties include substitutions at positions 259, 308, and 434, including for example 259I, 308F, 428L, 428M, 434S, 434H, 434F, 434Y, and 434M. Other variants that increase Fc binding to FcRn include: 250E, 250Q, 428L, 428F, 250Q/428L (Hinton et al., 2004, J. Biol. Chem. 279(8): 6213-6216, Hinton et al, 2006 Journal of Immunology 176:346-356), 256A, 272A, 305A, 307A, 311A, 312A, 378Q, 380A, 382A, 434A (Shields et al, Journal of Biological Chemistry, 2001, 276(9):6591-6604), 252F, 252Y, 252W, 254T, 256Q, 256E, 256D, 433R, 434F, 434Y, 252Y/254T/256E, 433K/434F/436H (Dall Acqua et al. Journal of Immunology, 2002, 169:5171-5180, Dall' Acqua et al., 2006, Journal of Biological Chemistry 281:23514-23524). See U.S. Pat. No. 8,367,805.

[0494] Modification of certain conserved residues in IgG Fc (I253/H310/Q311/H433/N434), such as the N434A variant (Yeung et al. (2009) J. Immunol. 182:7663), has been proposed as a way to increase FcRn affinity, thus increasing the half-life of the antibody in circulation. WO 98/023289. The combination Fc variant comprising M428L and N434S has been shown to increase FcRn binding and increase serum half-life up to five-fold. Zalevsky et al. (2010) Nat. Biotechnol. 28:157. The combination Fc variant comprising T307A, E380A and N434A modifications also extends half-life of IgG1 antibodies. Petkova et al. (2006) Int. Immunol. 18:1759. In addition, combination Fc variants comprising M252Y/M428L, M428L/N434H, M428L/N434F, M428L/N434Y, M428L/N434A, M428L/N434M, and M428L/N434S variants have also been shown to extend half-life. WO 2009/086320.

[0495] Further, a combination Fe variant comprising M252Y, S254T and T256E, increases half-life-nearly 4-fold. Dall'Acqua et al. (2006) J. Biol. Chem, 281:23514, A related IgG1 modification providing increased FeRn affinity but reduced pH dependence (M252Y/S254T/T256E/H433K/N434F) has been used to create an IgG1 construct (“MST-HN Abdeg”) for use as a competitor to prevent binding of other antibodies to FcRn, resulting in increased clearance of that other antibody, either endogenous IgG (e.g. in an autoimmune setting) or another exogenous (therapeutic) mAb. Vaccaro et Cpl. (2005) Nat. Biotechnol. 23:1283; WO 2006/130834.

[0496] Other modifications for increasing FcRn binding are described in Yeung et al. (2010) J. Immunol. 182:7663-7671; 6,277,375; 6,821,505; WO 97/34631; WO 2002/060919.

[0497] In certain embodiments, hybrid IgG isotypes may be used to increase FcRn binding, and potentially increase half-life. For example, an IgG1/IgG3 hybrid variant may be constructed by substituting IgG1 positions in the CH2 and/or CH3 region with the amino acids from IgG3 at positions where the two isotypes differ. Thus a hybrid variant IgG antibody may be constructed that comprises one or more substitutions, e.g., 274Q, 276K, 300F, 339T, 356E, 358M, 384S, 392N, 397M, 422I, 435R, and 436F. In other embodiments described herein, an IgG1/IgG2 hybrid variant may be constructed by substituting IgG2 positions in the CH2 and/or CH3 region with amino acids from IgG1 at positions where the two isotypes differ. Thus a hybrid variant IgG antibody may be constructed that comprises one or more substitutions, e.g., one or more of the following amino acid substitutions: 233E, 234L, 235L, -236G (referring to an insertion of a glycine at position 236), and 327A. See U.S. Pat. No. 8,629,113. A hybrid of IgG1/IgG2/IgG4 sequences has been generated that purportedly increases serum half-life and improves expression. U.S. Pat. No. 7,867,491 (sequence number 18 therein).

[0498] The serum half-life of the antibodies of the present invention can also be increased by pegylation. An antibody can be pegylated to, for example, increase the biological (e.g., serum) half-life of the antibody. To pegylate an antibody, the antibody, or fragment thereof, typically is reacted with a polyethylene glycol (PEG) reagent, such as a reactive ester or aldehyde derivative of PEG, under conditions in which one or more PEG groups become attached to the antibody or antibody fragment. Preferably, the pegylation is carried out via an acylation reaction or an alkylation reaction with a reactive PEG molecule (or an analogous reactive water-soluble polymer). As used herein, the term “polyethylene glycol” is intended to encompass any of the forms of PEG that have been used to derivatize other proteins, such as mono (C1-C10) alkoxy- or aryloxy-polyethylene glycol or polyethylene glycol-maleimide. In certain embodiments, the antibody to be pegylated is an aglycosylated antibody. Methods for pegylating proteins are known in the art and can be applied to the antibodies described herein. See for example, EP 0154316 by Nishimura et al. and EP 0401384 by Ishikawa et al.

[0499] Alternatively, under some circumstances it may be desirable to decrease the half-life of an antibody of the present invention, rather than increase it. Modifications such as I253A (Hornick et al. (2000) J. Nucl. Med. 41:355) and H435A/R I253A or H310A (Kim et al. (2000) Eur. J. Immunol. 29:2819) in Fc of human IgG1 can decrease FcRn binding, thus decreasing half-life (increasing clearance) for use in situations where rapid clearance is preferred, such a medical imaging. See also Kenanova et al. (2005) Cancer Res. 65:622. Other means to enhance clearance include formatting the antigen binding domains of the present invention as antibody fragments lacking the ability to bind FcRn, such as Fab fragments. Such modification can reduce the circulating half-life of an antibody from a couple of weeks to a matter of hours. Selective PEGylation of antibody fragments can then be used to fine-tune (increase) the half-life of the antibody fragments if necessary. Chapman et al. (1999) Nat. Biotechnol. 17:780. Antibody fragments may also be fused to human serum albumin, e.g. in a fusion protein construct, to increase half-life. Yeh et al. (1992) Proc. Nat'l Acad. Sci. 89:1904. Alternatively, a bispecific antibody may be constructed with a first antigen binding domain of the present invention and a second antigen binding domain that binds to human serum albumin (HSA). See Int'l Pat. Appl. Pub. WO 2009/127691 and patent references cited therein. Alternatively, specialized polypeptide sequences can be added to antibody fragments to increase half-life, e.g. “XTEN” polypeptide sequences. Schellenberger et al. (2009) Nat. Biotechnol. 27:1186; Intl Pat. Appl. Pub. WO 2010/091122. Additional Fc Variants

[0500] When using an IgG4 constant domain, it is usually preferable to include the substitution S228P, which mimics the hinge sequence in IgG1 and thereby stabilizes IgG4 molecules, e.g. reducing Fab-arm exchange between the therapeutic antibody and endogenous IgG4 in the patient being treated. Labrijn et al. (2009) Nat. Biotechnol. 27:767; Reddy et al. (2000) J. Immunol. 164:1925.

[0501] A potential protease cleavage site in the hinge of IgG1 constructs can be eliminated by D221G and K222S modifications, increasing the stability of the antibody. WO 2014/043344.

[0502] The affinities and binding properties of an Fe variant for its ligands (Fc receptors) may be determined by a variety of in vitro assay methods (biochemical or immunological based assays) known in the art including but not limited to, equilibrium methods (e.g., enzyme-linked immunoabsorbent assay (ELISA), or radioimmunoassay (MA)), or kinetics (e.g., BIACORE® SPR analysis), and other methods such as indirect binding assays, competitive inhibition assays, fluorescence resonance energy transfer (FRET), gel electrophoresis and chromatography (e.g., gel filtration). These and other methods may utilize a label on one or more of the components being examined and/or employ a variety of detection methods including but not limited to chromogenic, fluorescent, luminescent, or isotopic labels. A detailed description of binding affinities and kinetics can be found in Paul, W. E., ed., Fundamental Immunology, 4th Ed., Lippincott-Raven, Philadelphia (1999), which focuses on antibody-immunogen interactions.

[0503] In still other embodiments, the glycosylation of an antibody is modified to increase or decrease effector function. For example, an aglycoslated antibody can be made that lacks all effector function by mutating the conserved asparagine residue at position 297 (e.g. N297A), thus abolishing complement and FcγRI binding. Bolt et al. (1993) Eur. J. Immunol. 23:403. See also Tao & Morrison (1989) J. Immunol. 143:2595 (using N297Q in IgG1 to eliminate glycosylation at position 297).

[0504] Although aglycosylated antibodies generally lack effector function, mutations can be introduced to restore that function. Aglycosylated antibodies, e.g. those resulting from N297A/C/D/or H mutations or produced in systems (e.g. E. coli) that do not glycosylate proteins, can be further mutated to restore FcγR binding, e.g. S298G and/or T299A/G/or H (WO 2009/079242), or E382V and M4281 (Jung et al. (2010) Proc. Nat'l Acad. Sci (USA) 107:604).

[0505] Additionally, an antibody with enhanced ADCC can be made by altering the glycosylation. For example, removal of fucose from heavy chain Asn297-linked oligosaccharides has been shown to enhance ADCC, based on improved binding to FcγRIIIa. Shields et al. (2002) JBC 277:26733; Niwa et al. (2005) J. Immunol. Methods 306: 151; Cardarelli et al. (2009) Clin. Cancer Res. 15:3376 (MDX-1401); Cardarelli et al. (2010) Cancer Immunol. Immunotherap. 59:257 (MDX-1342). Such low fucose antibodies may be produced, e.g., in knockout Chinese hamster ovary (CHO) cells lacking fucosyltransferase (FUT8) (Yamane-Ohnuki et al. (2004) Biotechnol. Bioeng. 87:614), or in other cells that generate afucosylated antibodies. See, e.g., Zhang et al. (2011) mAbs 3:289 and Li et al. (2006) Nat. Biotechnol. 24:210 (both describing antibody production in glycoengineered Pichia pastoris.); Mossner et al. (2010) Blood 115:4393; Shields et al. (2002) J. Biol. Chem. 277:26733; Shinkawa et al. (2003) J. Biol. Chem. 278:3466; EP 1176195B1. ADCC can also be enhanced as described in PCT Publication WO 03/035835, which discloses use of a variant CHO cell line, Lec13, with reduced ability to attach fucose to Asn(297)-linked carbohydrates, also resulting in hypofucosylation of antibodies expressed in that host cell (see also Shields, R. L. et al. (2002) J. Biol. Chem. 277:26733-26740). Alternatively, fucose analogs may be added to culture medium during antibody production to inhibit incorporation of fucose into the carbohydrate on the antibody. WO 2009/135181.

[0506] Increasing bisecting GlcNac structures in antibody-linked oligosaccharides also enhances ADCC. PCT Publication WO 99/54342 by Umana et al. describes cell lines engineered to express glycoprotein-modifying glycosyl transferases (e.g., beta(1,4)-N-acetylglucosaminyltransferase III (GnTIII)) such that antibodies expressed in the engineered cell lines exhibit increased bisecting GlcNac structures which results in increased ADCC activity of the antibodies (see also Umana et al. (1999) Nat. Biotech. 17:176-180).

[0507] Additional glycosylation variants have been developed that are devoid of galactose, sialic acid, fucose and xylose residues (so-called GNGN glycoforms), which exhibit enhanced ADCC and ADCP but decreased CDC, as well as others that are devoid of sialic acid, fucose and xylose (so-called GI/G2 glycoforms), which exhibit enhanced ADCC, ADCP and CDC. U.S. Pat. App. Pub. No. 2013/0149300. Antibodies having these glycosylation patterns are optionally produced in genetically modified N. benthamiana plants in which the endogenous xylosyl and fucosyl transferase genes have been knocked-out.

[0508] Glycoengineering can also be used to modify the anti-inflammatory properties of an IgG construct by changing the α2,6 sialyl content of the carbohydrate chains attached at Asn297 of the Fc regions, wherein an increased proportion of a2,6 sialylated forms results in enhanced anti-inflammatory effects. See Nimmerjahn et al. (2008) Ann. Rev. Immunol. 26:513. Conversely, reduction in the proportion of antibodies having a2,6 sialylated carbohydrates may be useful in cases where anti-inflammatory properties are not wanted. Methods of modifying a2,6 sialylation content of antibodies, for example by selective purification of a2,6 sialylated forms or by enzymatic modification, are provided at U.S. Pat. Appl. Pub. No. 2008/0206246. In other embodiments, the amino acid sequence of the Fc region may be modified to mimic the effect of α2,6 sialylation, for example by inclusion of an F241A modification. WO 2013/095966.

### VIII. Antibody Physical Properties

[0509] Antibodies described herein can contain one or more glycosylation sites in either the light or heavy chain variable region. Such glycosylation sites may result in increased immunogenicity of the antibody or an alteration of the pK of the antibody due to altered antigen binding (Marshall et al (1972) Annu Rev Biochem 41:673-702; Gala and Morrison (2004) J. Immunol 172:5489-94; Wallick et al (1988) J. Exp Med 168:1099-109; Spiro (2002) Glycobiology 12:43R-56R; Parekh et al (1985) Nature 316:452-7; Mimura et al. (2000) Mol Immunol 37:697-706). Glycosylation has been known to occur at motifs containing an N—X-S/T sequence. In some instances, it is preferred to have an anti-CD73 antibody that does not contain variable region glycosylation. This can be achieved either by selecting antibodies that do not contain the glycosylation motif in the variable region or by mutating residues within the glycosylation region.

[0510] In certain embodiments, the antibodies described herein do not contain asparagine isomerism sites. The deamidation of asparagine may occur on N-G or D-G sequences and may result in the creation of an isoaspartic acid residue that may introduce a kink into the polypeptide chain and may decrease its stability (isoaspartic acid effect). For instance, if the amino acid sequence Asp-Gly is present in the heavy and/or light chain CDR sequences of the antibody, the sequence is substituted with an amino acid sequence that does not undergo isomerization. In one embodiment, the antibody comprises the heavy chain variable region CDR2 sequence set forth in SEQ ID NO: 6, but wherein the Asp or Gly in the Asp-Gly sequence (VILYDGSNKYYPDSVKG; SEQ ID NO: 6) is replaced with an amino acid sequence that does not undergo isomerization, for example, an Asp-Ser or a Ser-Gly sequence.

[0511] Each antibody will have a unique isoelectric point (pI), which generally falls in the pH range between 6 and 9.5. The pI for an IgG1 antibody typically falls within the pH range of 7-9.5 and the pI for an IgG4 antibody typically falls within the pH range of 6-8. There is speculation that antibodies with a pI outside the normal range may have some unfolding and instability under in vivo conditions. Thus, it is preferred to have an anti-CD73 antibody that contains a pI value that falls in the normal range. This can be achieved either by selecting antibodies with a pI in the normal range or by mutating charged surface residues.

[0512] Each antibody will have a characteristic melting temperature, with a higher melting temperature indicating greater overall stability in vivo (Krishnamurthy R and Manning M C (2002) Curr Pharm Biotechnol 3:361-71). Generally, it is preferred that the T_{M1} (the temperature of initial unfolding) be greater than 60° C., preferably greater than 65° C., even more preferably greater than 70° C. The melting point of an antibody can be measured using differential scanning calorimetry (Chen et al (2003) Pharm Res 20:1952-60; Ghirlando et al (1999) Immunol Lett 68:47-52) or circular dichroism (Murray et al. (2002) J. Chromatogr Sci 40:343-9). In a preferred embodiment, antibodies are selected that do not degrade rapidly. Degradation of an antibody can be measured using capillary electrophoresis (CE) and MALDI-MS (Alexander A J and Hughes D E (1995) Anal Chem 67:3626-32).

[0513] In another preferred embodiment, antibodies are selected that have minimal aggregation effects, which can lead to the triggering of an unwanted immune response and/or altered or unfavorable pharmacokinetic properties. Generally, antibodies are acceptable with aggregation of 25% or less, preferably 20% or less, even more preferably 15% or less, even more preferably 10% or less and even more preferably 5% or less. Aggregation can be measured by several techniques, including size-exclusion column (SEC), high performance liquid chromatography (HPLC), and light scattering.

### IX. Methods of Engineering Antibodies

[0514] As discussed above, the anti-CD73 antibodies having V_{H} and V_{L} sequences disclosed herein can be used to create new anti-CD73 antibodies by modifying the V_{H} and/or V_{L} sequences, or the constant region(s) attached thereto. Thus, in another aspect described herein, the structural features of an anti-CD73 antibody described herein, e.g. CD73.4, 11F11, 4C3, 4D4, 10D2, 11A6, 24H2, 5F8, 6E11 and/or 7A11, are used to create structurally related anti-CD73 antibodies that retain at least one functional property of the antibodies described herein, such as binding to human CD73 and cynomolgus CD73. For example, one or more CDR regions of 11F11, 4C3, 4D4, 10D2, 11A6, 24H2, 5F8, 6E11 and/or 7A11, or mutations thereof, can be combined recombinantly with known framework regions and/or other CDRs to create additional, recombinantly-engineered, anti-CD73 antibodies described herein, as discussed above. Other types of modifications include those described in the previous section. The starting material for the engineering method is one or more of the V_{H} and/or V_{L} sequences provided herein, or one or more CDR regions thereof. To create the engineered antibody, it is not necessary to actually prepare (i.e., express as a protein) an antibody having one or more of the V_{H} and/or V_{L} sequences provided herein, or one or more CDR regions thereof. Rather, the information contained in the sequence(s) is used as the starting material to create a “second generation” sequence(s) derived from the original sequence(s) and then the “second generation” sequence(s) is prepared and expressed as a protein.

[0515] Accordingly, provided herein are methods for preparing an anti-CD73 antibody comprising:

[0516] (a) providing: (i) a heavy chain variable region antibody sequence comprising a CDR1 sequence selected from the group consisting of SEQ ID NOs: 5, 17, 33, 41, 53, 61, 69, 81, and 89, a CDR2 sequence selected from the group consisting of SEQ ID NOs: 6, 18, 34, 42, 54, 62, 70, 82, and 90, and/or a CDR3 sequence selected from the group consisting of SEQ ID NOs: 7, 19, 35, 43, 55, 63, 71, 83, and 91; and (ii) a light chain variable region antibody sequence comprising a CDR1 sequence selected from the group consisting of SEQ ID NOs: 9, 13, 21, 25, 29, 37, 45, 49, 57, 65, 73, 77, 85, and 93, a CDR2 sequence selected from the group consisting of SEQ ID NOs: 10, 14, 22, 26, 30, 38, 46, 50, 58, 66, 74, 78, 86, and 94, and/or a CDR3 sequence selected from the group consisting of SEQ ID NOs: 11, 15, 23, 27, 31, 39, 47, 51, 59, 67, 75, 79, 87, and 95;

[0517] (b) altering at least one amino acid residue within the heavy chain variable region antibody sequence and/or the light chain variable region antibody sequence to create at least one altered antibody sequence; and

[0518] (c) expressing the altered antibody sequence as a protein.

[0519] Standard molecular biology techniques can be used to prepare and express the altered antibody sequence.

[0520] Preferably, the antibody encoded by the altered antibody sequence(s) is one that retains one, some or all of the functional properties of the anti-CD73 antibodies described herein, which include those listed in Table 3.

[0521] The altered antibody may exhibit one or more, two or more, three or more, four or more, five or more, six or more, seven or more, eight or more, nine or more, ten, or all of the functional properties using the functional assays described herein. The functional properties of the altered antibodies can be assessed using standard assays available in the art and/or described herein, such as those set forth in the Examples (e.g., ELISAs, FACS).

[0522] In certain embodiments of the methods of engineering antibodies described herein, mutations can be introduced randomly or selectively along all or part of an anti-CD73 antibody coding sequence and the resulting modified anti-CD73 antibodies can be screened for binding activity and/or other functional properties as described herein. Mutational methods have been described in the art. For example, PCT Publication WO 02/092780 by Short describes methods for creating and screening antibody mutations using saturation mutagenesis, synthetic ligation assembly, or a combination thereof. Alternatively, PCT Publication WO 03/074679 by Lazar et al. describes methods of using computational screening methods to optimize physiochemical properties of antibodies.

### X. Nucleic Acid Molecules

[0523] Another aspect described herein pertains to nucleic acid molecules that encode the antibodies described herein. The nucleic acids may be present in whole cells, in a cell lysate, or in a partially purified or substantially pure form. A nucleic acid is “isolated” or “rendered substantially pure” when purified away from other cellular components or other contaminants, e.g., other cellular nucleic acids (e.g., other chromosomal DNA, e.g., the chromosomal DNA that is linked to the isolated DNA in nature) or proteins, by standard techniques, including alkaline/SDS treatment, CsCl banding, column chromatography, restriction enzymes, agarose gel electrophoresis and others well known in the art. See, F. Ausubel, et al., ed. (1987) Current Protocols in Molecular Biology, Greene Publishing and Wiley Interscience, New York. A nucleic acid described herein can be, for example, DNA or RNA and may or may not contain intronic sequences. In a certain embodiments, the nucleic acid is a cDNA molecule.

[0524] Nucleic acids described herein can be obtained using standard molecular biology techniques. For antibodies expressed by hybridomas (e.g., hybridomas prepared from transgenic mice carrying human immunoglobulin genes as described further below), cDNAs encoding the light and heavy chains of the antibody made by the hybridoma can be obtained by standard PCR amplification or cDNA cloning techniques. For antibodies obtained from an immunoglobulin gene library (e.g., using phage display techniques), nucleic acid encoding the antibody can be recovered from the library.

[0525] Preferred nucleic acids molecules described herein are those encoding the VH and VL sequences of the anti-CD73 antibodies described herein, e.g., CD73.4 11F11-1, 11F11-2, 4C3-1, 4C3-2, 4C3-3, 4D4, 10D2-1, 10D2-2, 11A6, 24H2, 5F8-1, 5F8-2, 6E11, 7A11, CD73.3 and/or CD73.4 monoclonal antibodies. DNA sequences encoding the VH sequences of CD73.4 (CD73.4-1 and CD73.4-2) 11F11 (11F11-1 and 11F11-2), 4C3 (4C3-1, 4C3-2 and 4C3-3), 4D4, 10D2 (10D2-1 and 10D2-2), 11A6, 24H2, 5F8 (5F8-1 and 5F8-2), 6E11, 7A11, CD73.3 and CD73.4 are set forth in SEQ ID NOs: 4, 16, 32, 40, 52, 60, 68, 80, 88, 135, and 170, respectively. DNA sequences encoding the VL sequences of 11F11-1, 11F11-2, 4C3-1, 4C3-2, 4C3-3, 4D4, 10D2-1, 10D2-2, 11A6, 24H2, 5F8-1, 5F8-2, 6E117A11, CD73.3 and/or CD73.4 are set forth in SEQ ID NOs: 8, 12, 20, 24, 28, 36, 44, 48, 56, 64, 72, 76, 84, and 92, respectively.

[0526] Once DNA fragments encoding VH and VL segments are obtained, these DNA fragments can be further manipulated by standard recombinant DNA techniques, for example to convert the variable region genes to full-length antibody chain genes, to Fab fragment genes or to a scFv gene. In these manipulations, a VL- or VH-encoding DNA fragment is operatively linked to another DNA fragment encoding another protein, such as an antibody constant region or a flexible linker. The term “operatively linked”, as used in this context, is intended to mean that the two DNA fragments are joined such that the amino acid sequences encoded by the two DNA fragments remain in-frame.

[0527] The isolated DNA encoding the VH region can be converted to a full-length heavy chain gene by operatively linking the VH-encoding DNA to another DNA molecule encoding heavy chain constant regions (hinge, CH1, CH2 and/or CH3). The sequences of human heavy chain constant region genes are known in the art (see e.g., Kabat, E. A., el al. (1991) Sequences of Proteins of Immunological Interest, Fifth Edition, U.S. Department of Health and Human Services, NIH Publication No. 91-3242) and DNA fragments encompassing these regions can be obtained by standard PCR amplification. The heavy chain constant region can be an IgG1, IgG2, IgG3, IgG4, IgA, IgE, IgM or IgD constant region, for example, an IgG1 region. For a Fab fragment heavy chain gene, the VH-encoding DNA can be operatively linked to another DNA molecule encoding only the heavy chain CH1 constant region.

[0528] The isolated DNA encoding the VL region can be converted to a full-length light chain gene (as well as a Fab light chain gene) by operatively linking the VL-encoding DNA to another DNA molecule encoding the light chain constant region, CL. The sequences of human light chain constant region genes are known in the art (see e.g., Kabat, E. A., et al. (1991) Sequences of Proteins of Immunological Interest, Fifth Edition, U.S. Department of Health and Human Services, NIH Publication No. 91-3242) and DNA fragments encompassing these regions can be obtained by standard PCR amplification. The light chain constant region can be a kappa or lambda constant region.

[0529] To create a scFv gene, the VH- and VL-encoding DNA fragments are operatively linked to another fragment encoding a flexible linker, e.g., encoding the amino acid sequence (Gly4-Ser)₃, such that the VH and VL sequences can be expressed as a contiguous single-chain protein, with the VL and VH regions joined by the flexible linker (see e.g., Bird et al. (1988) Science 242:423-426; Huston et al. (1988) Proc. Natl. Acad. Sci. USA 85:5879-5883; McCafferty et al., (1990) Nature 348:552-554).

[0530] Also provided herein are nucleic acid molecules encoding VH and VL sequences or full length heavy and light chains that are homologous to those of antibodies described herein, e.g., the 11F11-1, 11F11-2, 4C3-1, 4C3-2, 4C3-3, 4D4, 10D2-1, 10D2-2, 11A6, 24H2, 5F8-1, 5F8-2, 6E117A11, CD73.3 and/or CD73.4 monoclonal antibodies. Exemplary nucleic acid molecules encode VH and VL sequences that are at least 70% identical, for example, at least 75%, at least 80%, at least 85%, at least 90%, at least 95%, or at least 99% identical, to nucleic acid molecules encoding the VH and VL sequences or the full length heavy and light chains of the 11F11-1, 11F11-2, 4C3-1, 4C3-2, 4C3-3, 4D4, 10D2-1, 10D2-2, 11A6, 24H2, 5F8-1, 5F8-2, 6E11 7A11, CD73.3 and/or CD73.4 monoclonal antibodies, e.g., the sequences set forth in Table 37. For example, provided herein are anti-CD73 antibodies comprising a VH chain and a VL chain that are encoded by nucleotides sequences that are at least 80%, 85%, 90%, 95%, 96%, 97%, 98%, 99% or 100% identical to SEQ ID NO: 139 and SEQ ID NO: 140 or 141; SEQ ID NO: 237 and SEQ ID NO: 140 or 141; SEQ ID NO: 142 and SEQ ID NO: 143, 144 or 145; SEQ ID NO: 146 and SEQ ID NO: 147; SEQ ID NO: 148 and SEQ ID NO:149 or 150; SEQ ID NO: 151 and SEQ ID NO: 152; SEQ ID NO: 153 and SEQ ID NO: 154; SEQ ID NO: 155 and SEQ ID NO: 156 or 157 or 242; SEQ ID NO: 158 and SEQ ID NO: 159; SEQ ID NO: 160 and SEQ ID NO: 161. Also provided are anti-CD73 antibodies comprising a heavy chain and a light chain that are encoded by nucleotides sequences that are at least 80%, 85%, 90%, 95%, 96%, 97%, 98%, 99% or 100% identical to SEQ ID NOs: 134, 214, 215, 216, 217, 218, 219, 220, 221, 222, 223, 224, 225, 226, 227, 228, 229, 230, 231, 232, 233, 234, 243, 266 (heavy chain) and SEQ ID NO: 244 or 245 (light chain); SEQ ID NO: 211, 212, 213 or 246 and SEQ ID NO: 247, 248 or 249; SEQ ID NO: 235, 236 or 250 and 251; SEQ ID NO: 252 and SEQ ID NO: 253 or 254; SEQ ID NO: 255 and SEQ ID NO: 256; SEQ ID NO: 257 and SEQ ID NO: 258; SEQ ID NO: 259 and SEQ ID NO: 260 or 261; SEQ ID NO: 262 and SEQ ID NO: 263; SEQ ID NO: 264 and SEQ ID NO: 265. Also provided herein are nucleic acid molecules with silent mutations (i.e., base changes that do not alter the resulting amino acid sequence upon translation of nucleic acid molecule), e.g., for codon optimization.

### XI. Antibody Generation

[0531] Various antibodies of the present invention, e.g. those that compete with or bind to the same epitope as the anti-human CD73 antibodies disclosed herein, can be produced using a variety of known techniques, such as the standard somatic cell hybridization technique described by Kohler and Milstein, Nature 256: 495 (1975). Although somatic cell hybridization procedures are preferred, in principle, other techniques for producing monoclonal antibodies also can be employed, e.g., viral or oncogenic transformation of B lymphocytes, phage display technique using libraries of human antibody genes.

[0532] The preferred animal system for preparing hybridomas is the murine system. Hybridoma production in the mouse is a very well-established procedure. Immunization protocols and techniques for isolation of immunized splenocytes for fusion are known in the art. Fusion partners (e.g., murine myeloma cells) and fusion procedures are also known.

[0533] Chimeric or humanized antibodies described herein can be prepared based on the sequence of a murine monoclonal antibody prepared as described above. DNA encoding the heavy and light chain immunoglobulins can be obtained from the murine hybridoma of interest and engineered to contain non-murine (e.g., human) immunoglobulin sequences using standard molecular biology techniques. For example, to create a chimeric antibody, the murine variable regions can be linked to human constant regions using methods known in the art (see e.g., U.S. Pat. No. 4,816,567 to Cabilly et al.). To create a humanized antibody, the murine CDR regions can be inserted into a human framework using methods known in the art (see e.g., U.S. Pat. No. 5,225,539 to Winter, and U.S. Pat. Nos. 5,530,101; 5,585,089; 5,693,762 and 6,180,370 to Queen et al.).

[0534] In one embodiment, the antibodies described herein are human monoclonal antibodies. Such human monoclonal antibodies directed against CD73 can be generated using transgenic or transchromosomic mice carrying parts of the human immune system rather than the mouse system. These transgenic and transchromosomic mice include mice referred to herein as HuMAb mice and KM mice, respectively, and are collectively referred to herein as “human Ig mice.”

[0535] The HuMAb Mouse® (Medarex, Inc.) contains human immunoglobulin gene miniloci that encode unrearranged human heavy (μ and γ) and κ light chain immunoglobulin sequences, together with targeted mutations that inactivate the endogenous μ and κ chain loci (see e.g., Lonberg, et al. (1994) Nature 368(6474): 856-859). Accordingly, the mice exhibit reduced expression of mouse IgM or κ, and in response to immunization, the introduced human heavy and light chain transgenes undergo class switching and somatic mutation to generate high affinity human IgGκ monoclonal (Lonberg, N. et al. (1994), supra; reviewed in Lonberg, N. (1994) Handbook of Experimental Pharmacology 113:49-101; Lonberg, N. and Huszar, D. (1995) Intern. Rev. Immunol. 13: 65-93, and Harding, F. and Lonberg, N. (1995) Ann. N.Y. Acad. Sci. 764:536-546). The preparation and use of HuMab mice, and the genomic modifications carried by such mice, is further described in Taylor, L. et al. (1992) Nucleic Acids Research 20:6287-6295; Chen, J. et al. (1993) International Immunology 5: 647-656; Tuaillon et al. (1993) Proc. Natl. Acad. Sci. USA 90:3720-3724; Choi et al. (1993) Nature Genetics 4:117-123; Chen, J. et al. (1993) EMBO J. 12: 821-830; Tuaillon et al. (1994) J. Immunol. 152:2912-2920; Taylor, L. et al. (1994) International Immunology 6: 579-591; and Fishwild, D. et al. (1996) Nature Biotechnology 14: 845-851, the contents of all of which are hereby specifically incorporated by reference in their entirety. See further, U.S. Pat. Nos. 5,545,806; 5,569,825; 5,625,126; 5,633,425; 5,789,650; 5,877,397; 5,661,016; 5,814,318; 5,874,299; and 5,770,429; all to Lonberg and Kay; U.S. Pat. No. 5,545,807 to Surani et al.; PCT Publication Nos. WO 92/03918, WO 93/12227, WO 94/25585, WO 97/13852, WO 98/24884 and WO 99/45962, all to Lonberg and Kay; and PCT Publication No. WO 01/14424 to Korman et al.

[0536] In certain embodiments, antibodies described herein are raised using a mouse that carries human immunoglobulin sequences on transgenes and transchromosomes, such as a mouse that carries a human heavy chain transgene and a human light chain transchromosome. Such mice, referred to herein as “KM mice”, are described in detail in PCT Publication WO 02/43478 to Ishida et al.

[0537] Still further, alternative transgenic animal systems expressing human immunoglobulin genes are available in the art and can be used to raise anti-CD73 antibodies described herein. For example, an alternative transgenic system referred to as the Xenomouse (Abgenix, Inc.) can be used; such mice are described in, for example, U.S. Pat. Nos. 5,939,598; 6,075,181; 6,114,598; 6, 150,584 and 6,162,963 to Kucherlapati et al.

[0538] Moreover, alternative transchromosomic animal systems expressing human immunoglobulin genes are available in the art and can be used to raise anti-CD73 antibodies described herein. For example, mice carrying both a human heavy chain transchromosome and a human light chain transchromosome, referred to as “TC mice” can be used; such mice are described in Tomizuka et al. (2000) Proc. Natl. Acad. Sci. USA 97:722-727. Furthermore, cows carrying human heavy and light chain transchromosomes have been described in the art (Kuroiwa et al. (2002) Nature Biotechnology 20:889-894) and can be used to raise anti-CD73 antibodies described herein.

[0539] Additional mouse systems described in the art for raising human antibodies, e.g., human anti-CD73 antibodies, include (i) the VelocImmune® mouse (Regeneron Pharmaceuticals, Inc.), in which the endogenous mouse heavy and light chain variable regions have been replaced, via homologous recombination, with human heavy and light chain variable regions, operatively linked to the endogenous mouse constant regions, such that chimeric antibodies (human V/mouse C) are raised in the mice, and then subsequently converted to fully human antibodies using standard recombinant DNA techniques; and (ii) the MeMo® mouse (Merus Biopharmaceuticals, Inc.), in which the mouse contains unrearranged human heavy chain variable regions but a single rearranged human common light chain variable region. Such mice, and use thereof to raise antibodies, are described in, for example, WO 2009/15777, US 2010/0069614, WO 2011/072204, WO 2011/097603, WO 2011/163311, WO 2011/163314, WO 2012/148873, US 2012/0070861 and US 2012/0073004.

[0540] Human monoclonal antibodies described herein can also be prepared using phage display methods for screening libraries of human immunoglobulin genes. Such phage display methods for isolating human antibodies are established in the art. See for example: U.S. Pat. Nos. 5,223,409; 5,403,484; and U.S. Pat. No. 5,571,698 to Ladner et al.; U.S. Pat. Nos. 5,427,908 and 5,580,717 to Dower et al.; U.S. Pat. Nos. 5,969,108 and 6,172,197 to McCafferty et al.; and U.S. Pat. Nos. 5,885,793; 6,521,404; 6,544,731; 6,555,313; 6,582,915 and 6,593,081 to Griffiths et al.

[0541] Human monoclonal antibodies described herein can also be prepared using SCID mice into which human immune cells have been reconstituted such that a human antibody response can be generated upon immunization. Such mice are described in, for example, U.S. Pat. Nos. 5,476,996 and 5,698,767 to Wilson et al.

### Immunizations

[0542] To generate fully human antibodies to CD73, transgenic or transchromosomal mice containing human immunoglobulin genes (e.g., HCo12, HCo7 or KM mice) can be immunized with a purified or enriched preparation of the CD73 antigen and/or cells expressing CD73, as described for other antigens, for example, by Lonberg et al. (1994) Nature 368(6474): 856-859; Fishwild et al. (1996) Nature Biotechnology 14: 845-851 and WO 98/24884. Alternatively, mice can be immunized with DNA encoding human CD73. Preferably, the mice will be 6-16 weeks of age upon the first infusion. For example, a purified or enriched preparation (5-50 μg) of the recombinant CD73 antigen can be used to immunize the HuMAb mice intraperitoneally. In the event that immunizations using a purified or enriched preparation of the CD73 antigen do not result in antibodies, mice can also be immunized with cells expressing CD73, e.g., a cell line, to promote immune responses. Exemplary cell lines include CD73-overexpressing stable CHO and Raji cell lines.

[0543] Cumulative experience with various antigens has shown that the HuMAb transgenic mice respond best when initially immunized intraperitoneally (IP) or subcutaneously (SC) with antigen in Ribi's adjuvant, followed by every other week IP/SC immunizations (up to a total of 10) with antigen in Ribi's adjuvant. The immune response can be monitored over the course of the immunization protocol with plasma samples being obtained by retroorbital bleeds. The plasma can be screened by ELISA and FACS (as described below), and mice with sufficient titers of anti-CD73 human immunoglobulin can be used for fusions. Mice can be boosted intravenously with antigen 3 days before sacrifice and removal of the spleen and lymph nodes. It is expected that 2-3 fusions for each immunization may need to be performed. Between 6 and 24 mice are typically immunized for each antigen. Usually, HCo7, HCo12, and KM strains are used. In addition, both HCo7 and HCo12 transgene can be bred together into a single mouse having two different human heavy chain transgenes (HCo7/HCo12).

### Generation of Hybridomas Producing Monoclonal Antibodies to CD73

[0544] To generate hybridomas producing human monoclonal antibodies described herein, splenocytes and/or lymph node cells from immunized mice can be isolated and fused to an appropriate immortalized cell line, such as a mouse myeloma cell line. The resulting hybridomas can be screened for the production of antigen-specific antibodies. For example, single cell suspensions of splenic lymphocytes from immunized mice can be fused to Sp2/0 nonsecreting mouse myeloma cells (ATCC, CRL 1581) with 50% PEG. Cells are plated at approximately 2×10⁵ in flat bottom microtiter plate, followed by a two week incubation in selective medium containing 10% fetal Clone Serum, 18% “653” conditioned media, 5% origen (IGEN), 4 mM L-glutamine, 1 mM sodium pyruvate, 5 mM HEPES, 0.055 mM 2-mercaptoethanol, 50 units/ml penicillin, 50 mg/ml streptomycin, 50 mg/ml gentamycin and 1X HAT (Sigma). After approximately two weeks, cells can be cultured in medium in which the HAT is replaced with HT. Individual wells can then be screened by ELISA for human monoclonal IgM and IgG antibodies. Once extensive hybridoma growth occurs, medium can be observed usually after 10-14 days. The antibody secreting hybridomas can be replated, screened again, and if still positive for human IgG, the monoclonal antibodies can be subcloned at least twice by limiting dilution. The stable subclones can then be cultured in vitro to generate small amounts of antibody in tissue culture medium for characterization.

[0545] To purify human monoclonal antibodies, selected hybridomas can be grown in two-liter spinner-flasks for monoclonal antibody purification. Supernatants can be filtered and concentrated before affinity chromatography with protein A-sepharose (Pharmacia, Piscataway, N.J.). Eluted IgG can be checked by gel electrophoresis and high performance liquid chromatography to ensure purity. The buffer solution can be exchanged into PBS, and the concentration can be determined by OD280 using 1.43 extinction coefficient. The monoclonal antibodies can be aliquoted and stored at −80° C.

### XII. Antibody Manufacture

### Generation of Transfectomas Producing Monoclonal Antibodies to CD73

[0546] Antibodies of the present invention, including both specific antibodies for which sequences are provided and other, related anti-CD73 antibodies, can be produced in a host cell transfectoma using, for example, a combination of recombinant DNA techniques and gene transfection methods as is well known in the art (Morrison, S. (1985) Science 229:1202).

[0547] For example, to express antibodies, or antibody fragments thereof, DNAs encoding partial or full-length light and heavy chains, can be obtained by standard molecular biology techniques (e.g., PCR amplification or cDNA cloning using a hybridoma that expresses the antibody of interest) and the DNAs can be inserted into expression vectors such that the genes are operatively linked to transcriptional and translational control sequences. In this context, the term “operatively linked” is intended to mean that an antibody gene is ligated into a vector such that transcriptional and translational control sequences within the vector serve their intended function of regulating the transcription and translation of the antibody gene. The expression vector and expression control sequences are chosen to be compatible with the expression host cell used. The antibody light chain gene and the antibody heavy chain gene can be inserted into separate vector or both genes are inserted into the same expression vector. The antibody genes are inserted into the expression vector(s) by standard methods (e.g., ligation of complementary restriction sites on the antibody gene fragment and vector, or blunt end ligation if no restriction sites are present). The light and heavy chain variable regions of the antibodies described herein can be used to create full-length antibody genes of any antibody isotype by inserting them into expression vectors already encoding heavy chain constant and light chain constant regions of the desired isotype such that the V_{H} segment is operatively linked to the C_{H} segment(s) within the vector and the V_{L} segment is operatively linked to the C_{L} segment within the vector. Additionally or alternatively, the recombinant expression vector can encode a signal peptide that facilitates secretion of the antibody chain from a host cell. The antibody chain gene can be cloned into the vector such that the signal peptide is linked in-frame to the amino terminus of the antibody chain gene. The signal peptide can be an immunoglobulin signal peptide or a heterologous signal peptide (i.e., a signal peptide from a non-immunoglobulin protein).

[0548] In addition to the antibody chain genes, recombinant expression vectors may carry regulatory sequences that control the expression of the antibody chain genes in a host cell. The term “regulatory sequence” is intended to include promoters, enhancers and other expression control elements (e.g., polyadenylation signals) that control the transcription or translation of the antibody chain genes. Such regulatory sequences are described, for example, in Goeddel (Gene Expression Technology. Methods in Enzymology 185, Academic Press, San Diego, Calif. (1990)). It will be appreciated by those skilled in the art that the design of the expression vector, including the selection of regulatory sequences, may depend on such factors as the choice of the host cell to be transformed, the level of expression of protein desired, etc. Preferred regulatory sequences for mammalian host cell expression include viral elements that direct high levels of protein expression in mammalian cells, such as promoters and/or enhancers derived from cytomegalovirus (CMV), Simian Virus 40 (SV40), adenovirus, (e.g., the adenovirus major late promoter (AdMLP) and polyoma. Alternatively, nonviral regulatory sequences may be used, such as the ubiquitin promoter or β-globin promoter. Still further, regulatory elements composed of sequences from different sources, such as the SRα promoter system, which contains sequences from the SV40 early promoter and the long terminal repeat of human T cell leukemia virus type 1 (Takebe, Y. et al. (1988) Mol. Cell. Biol. 8:466-472).

[0549] In addition to the antibody chain genes and regulatory sequences, recombinant expression vectors may carry additional sequences, such as sequences that regulate replication of the vector in host cells (e.g., origins of replication) and selectable marker genes. The selectable marker gene facilitates selection of host cells into which the vector has been introduced (see, e.g., U.S. Pat. Nos. 4,399,216, 4,634,665 and 5,179,017, all by Axel et al.). For example, typically the selectable marker gene confers resistance to drugs, such as G418, hygromycin or methotrexate, on a host cell into which the vector has been introduced. Preferred selectable marker genes include the dihydrofolate reductase (DHFR) gene (for use in dhfr-host cells with methotrexate selection/amplification) and the neo gene (for G418 selection).

[0550] For expression of the light and heavy chains, the expression vector(s) encoding the heavy and light chains is transfected into a host cell by standard techniques. The various forms of the term “transfection” are intended to encompass a wide variety of techniques commonly used for the introduction of exogenous DNA into a prokaryotic or eukaryotic host cell, e.g., electroporation, calcium-phosphate precipitation, DEAE-dextran transfection and the like. Although it is theoretically possible to express the antibodies described herein in either prokaryotic or eukaryotic host cells, expression of antibodies in eukaryotic cells, and most preferably mammalian host cells, is the most preferred because such eukaryotic cells, and in particular mammalian cells, are more likely than prokaryotic cells to assemble and secrete a properly folded and immunologically active antibody. Prokaryotic expression of antibody genes has been reported to be ineffective for production of high yields of active antibody (Boss, M. A. and Wood, C. R. (1985) Immunology Today 6:12-13). Antibodies of the present invention can also be produced in glycoengineered strains of the yeast Pichia pastoris. Li et al. (2006) Nat. Biotechnol. 24:210.

[0551] Preferred mammalian host cells for expressing the recombinant antibodies described herein include Chinese Hamster Ovary (CHO cells) (including dhfr-CHO cells, described in Urlaub and Chasin, (1980) Proc. Natl. Acad. Sci. USA 77:4216-4220, used with a DHFR selectable marker, e.g., as described in R. J. Kaufman and P. A. Sharp (1982) Mol. Biol. 159:601-621), NSO myeloma cells, COS cells and SP2 cells. In particular, for use with NSO myeloma cells, another preferred expression system is the GS gene expression system disclosed in WO 87/04462, WO 89/01036 and EP 338,841. When recombinant expression vectors encoding antibody genes are introduced into mammalian host cells, the antibodies are produced by culturing the host cells for a period of time sufficient to allow for expression of the antibody in the host cells or, more preferably, secretion of the antibody into the culture medium in which the host cells are grown. Antibodies can be recovered from the culture medium using standard protein purification methods.

[0552] The N- and C-termini of antibody polypeptide chains of the present invention may differ from the expected sequence due to commonly observed post-translational modifications. For example, C-terminal lysine residues are often missing from antibody heavy chains. Dick et al. (2008) Biotechnol. Bioeng. 100:1132. N-terminal glutamine residues, and to a lesser extent glutamate residues, are frequently converted to pyroglutamate residues on both light and heavy chains of therapeutic antibodies. Dick et al. (2007) Biotechnol. Bioeng. 97:544; Liu et al. (2011) JBC 28611211; Liu et al. (2011) J. Biol. Chem. 286:11211.

### XIII. Assays

[0553] Antibodies described herein can be tested for binding to CD73 by, for example, standard ELISA. Briefly, microtiter plates are coated with purified CD73 at 1-2 μg/ml in PBS, and then blocked with 5% bovine serum albumin in PBS. Dilutions of antibody (e.g., dilutions of plasma from CD73-immunized mice) are added to each well and incubated for 1-2 hours at 37° C. The plates are washed with PBS/Tween and then incubated with secondary reagent (e.g., for human antibodies, a goat-anti-human IgG Fc-specific polyclonal reagent) conjugated to horseradish peroxidase (HRP) for 1 hour at 37° C. After washing, the plates are developed with ABTS substrate (Moss Inc, product: ABTS-1000) and analyzed by a spectrophotometer at OD 415-495. Sera from immunized mice are then further screened by flow cytometry for binding to a cell line expressing human CD73, but not to a control cell line that does not express CD73. Briefly, the binding of anti-CD73 antibodies is assessed by incubating CD73 expressing CHO cells with the anti-CD73 antibody at 1:20 dilution. The cells are washed and binding is detected with a PE-labeled anti-human IgG Ab. Flow cytometric analyses are performed using a FACScan flow cytometry (Becton Dickinson, San Jose, Calif.). Preferably, mice which develop the highest titers will be used for fusions.

[0554] An ELISA assay as described above can be used to screen for antibodies and, thus, hybridomas that produce antibodies that show positive reactivity with the CD73 immunogen. Hybridomas that produce antibodies that bind, preferably with high affinity, to CD73 can then be subcloned and further characterized. One clone from each hybridoma, which retains the reactivity of the parent cells (by ELISA), can then be chosen for making a cell bank, and for antibody purification.

[0555] To purify anti-CD73 antibodies, selected hybridomas can be grown in two-liter spinner-flasks for monoclonal antibody purification. Supernatants can be filtered and concentrated before affinity chromatography with protein A-sepharose (Pharmacia, Piscataway, N.J.). Eluted IgG can be checked by gel electrophoresis and high performance liquid chromatography to ensure purity. The buffer solution can be exchanged into PBS, and the concentration can be determined by OD₂₈₀ using 1.43 extinction coefficient. The monoclonal antibodies can be aliquoted and stored at −80° C.

[0556] To determine if the selected anti-CD73 monoclonal antibodies bind to unique epitopes, each antibody can be biotinylated using commercially available reagents (Pierce, Rockford, Ill.). Biotinylated mAb binding can be detected with a streptavidin labeled probe. Competition studies using unlabeled monoclonal antibodies and biotinylated monoclonal antibodies can be performed using CD73 coated-ELISA plates as described above.

[0557] To determine the isotype of purified antibodies, isotype ELISAs can be performed using reagents specific for antibodies of a particular isotype. For example, to determine the isotype of a human monoclonal antibody, wells of microtiter plates can be coated with 1 μg/ml of anti-human immunoglobulin overnight at 4° C. After blocking with 1% BSA, the plates are reacted with 1 μg/ml or less of test monoclonal antibodies or purified isotype controls, at ambient temperature for one to two hours. The wells can then be reacted with either human IgG1 or human IgM-specific alkaline phosphatase-conjugated probes. Plates are developed and analyzed as described above.

[0558] To test the binding of monoclonal antibodies to live cells expressing CD73, flow cytometry can be used, as described in the Examples. Briefly, cell lines expressing membrane-bound CD73 (grown under standard growth conditions) are mixed with various concentrations of monoclonal antibodies in PBS containing 0.1% BSA at 4° C. for 1 hour. After washing, the cells are reacted with Fluorescein-labeled anti-IgG antibody under the same conditions as the primary antibody staining. The samples can be analyzed by FACScan instrument using light and side scatter properties to gate on single cells and binding of the labeled antibodies is determined. An alternative assay using fluorescence microscopy may be used (in addition to or instead of) the flow cytometry assay. Cells can be stained exactly as described above and examined by fluorescence microscopy. This method allows visualization of individual cells, but may have diminished sensitivity depending on the density of the antigen.

[0559] Anti-CD73 antibodies can be further tested for reactivity with the CD73 antigen by Western blotting. Briefly, cell extracts from cells expressing CD73 can be prepared and subjected to sodium dodecyl sulfate polyacrylamide gel electrophoresis. After electrophoresis, the separated antigens will be transferred to nitrocellulose membranes, blocked with 20% mouse serum, and probed with the monoclonal antibodies to be tested. IgG binding can be detected using anti-IgG alkaline phosphatase and developed with BCIP/NBT substrate tablets (Sigma Chem. Co., St. Louis, Mo.).

[0560] Methods for analyzing binding affinity, cross-reactivity, and binding kinetics of various anti-CD73 antibodies include standard assays known in the art, for example, BIACORE® surface plasmon resonance (SPR) analysis using a BIACORE® 2000 SPR instrument (Biacore AB, Uppsala, Sweden).

### XIV. Immunoconjugates and Antibody Derivatives

[0561] Antibodies described herein can be used for diagnostic purposes, including sample testing and in vivo imaging, and for this purpose the antibody (or binding fragment thereof) can be conjugated to an appropriate detectable agent, to form an immunoconjugate. For diagnostic purposes, appropriate agents are detectable labels that include radioisotopes, for whole body imaging, and radioisotopes, enzymes, fluorescent labels and other suitable antibody tags for sample testing.

[0562] The detectable labels can be any of the various types used currently in the field of in vitro diagnostics, including particulate labels including metal sols such as colloidal gold, isotopes such as I¹²⁵ or Tc⁹⁹ presented for instance with a peptidic chelating agent of the N₂S₂, N₃S or N₄ type, chromophores including fluorescent markers, biotin, luminescent markers, phosphorescent markers and the like, as well as enzyme labels that convert a given substrate to a detectable marker, and polynucleotide tags that are revealed following amplification such as by polymerase chain reaction. A biotinylated antibody would then be detectable by avidin or streptavidin binding. Suitable enzyme labels include horseradish peroxidase, alkaline phosphatase and the like. For instance, the label can be the enzyme alkaline phosphatase, detected by measuring the presence or formation of chemiluminescence following conversion of 1,2 dioxetane substrates such as adamantyl methoxy phosphoryloxy phenyl dioxetane (AMPPD), disodium 3-(4-(methoxyspiro{1,2-dioxetane-3,2′-(5′-chloro)tricyclo{3.3.1.1 3,7}decan}-4-yl) phenyl phosphate (CSPD), as well as CDP and CDP-Star® or other luminescent substrates well-known to those in the art, for example the chelates of suitable lanthanides such as Terbium(III) and Europium(III). The detection means is determined by the chosen label. Appearance of the label or its reaction products can be achieved using the naked eye, in the case where the label is particulate and accumulates at appropriate levels, or using instruments such as a spectrophotometer, a luminometer, a fluorimeter, and the like, all in accordance with standard practice.

[0563] Preferably, conjugation methods result in linkages which are substantially (or nearly) non-immunogenic, e.g., peptide- (i.e. amide-), sulfide-, (sterically hindered), disulfide-, hydrazone-, and ether linkages. These linkages are nearly non-immunogenic and show reasonable stability within serum (see e.g. Senter, P. D., Curr. Opin. Chem. Biol. 13 (2009) 235-244; WO 2009/059278; WO 95/17886).

[0564] Depending on the biochemical nature of the moiety and the antibody, different conjugation strategies can be employed. In case the moiety is naturally occurring or recombinant polypeptide of between 50 to 500 amino acids, there are standard procedures in text books describing the chemistry for synthesis of protein conjugates, which can be easily followed by the skilled artisan (see e.g. Hackenberger, C. P. R., and Schwarzer, D., Angew. Chem. Int. Ed. Engl. 47 (2008) 10030-10074). In one embodiment the reaction of a maleinimido moiety with a cysteine residue within the antibody or the moiety is used. This is an especially suitable coupling chemistry in case e.g. a Fab or Fab′-fragment of an antibody is used. Alternatively in one embodiment coupling to the C-terminal end of the antibody or moiety is performed. C-terminal modification of a protein, e.g. of a Fab-fragment can be performed as described (Sunbul, M. and Yin, J., Org. Biomol. Chem. 7 (2009) 3361-3371).

[0565] In general site specific reaction and covalent coupling is based on transforming a natural amino acid into an amino acid with a reactivity which is orthogonal to the reactivity of the other functional groups present. For example, a specific cysteine within a rare sequence context can be enzymatically converted in an aldehyde (see Frese, M. A., and Dierks, T., Chem Bio Chem. 10 (2009) 425-427). It is also possible to obtain a desired amino acid modification by utilizing the specific enzymatic reactivity of certain enzymes with a natural amino acid in a given sequence context (see, e.g., Taki, M. et al., Prot. Eng. Des. Sel. 17 (2004) 119-126; Gautier, A. et al. Chem. Biol. 15 (2008) 128-136. Protease-catalyzed formation of C—N bonds is described at Bordusa, F., Highlights in Bioorganic Chemistry (2004) 389-403.

[0566] Site specific reaction and covalent coupling can also be achieved by the selective reaction of terminal amino acids with appropriate modifying reagents. The reactivity of an N-terminal cysteine with benzonitrils (see Ren, H. et al., Angew. Chem. Int. Ed. Engl. 48 (2009) 9658-9662) can be used to achieve a site-specific covalent coupling. Native chemical ligation can also rely on C-terminal cysteine residues (Taylor, E. Vogel; Imperiali, B, Nucleic Acids and Molecular Biology (2009), 22 (Protein Engineering), 65-96). EP 1 074 563 describes a conjugation method which is based on the faster reaction of a cysteine within a stretch of negatively charged amino acids than a cysteine located in a stretch of positively charged amino acids.

[0567] The moiety may also be a synthetic peptide or peptide mimic. In case a polypeptide is chemically synthesized, amino acids with orthogonal chemical reactivity can be incorporated during such synthesis (see e.g. de Graaf, A. J. et al., Bioconjug. Chem. 20 (2009) 1281-1295). Since a great variety of orthogonal functional groups is at stake and can be introduced into a synthetic peptide, conjugation of such peptide to a linker is standard chemistry.

[0568] In order to obtain a mono-labeled polypeptide the conjugate with 1:1 stoichiometry may be separated by chromatography from other conjugation side-products. This procedure can be facilitated by using a dye labeled binding pair member and a charged linker. By using this kind of labeled and highly negatively charged binding pair member, mono conjugated polypeptides are easily separated from non-labeled polypeptides and polypeptides which carry more than one linker, since the difference in charge and molecular weight can be used for separation. The fluorescent dye can be useful for purifying the complex from un-bound components, like a labeled monovalent binder.

[0569] In one embodiment the moiety attached to an anti-CD73 antibody is selected from the group consisting of a binding moiety, a labeling moiety, and a biologically active moiety.

[0570] Antibodies described herein may also be conjugated to a therapeutic agent to form an immunoconjugate such as an antibody-drug conjugate (ADC). Suitable therapeutic agents include antimetabolites, alkylating agents, DNA minor groove binders, DNA intercalators, DNA crosslinkers, histone deacetylase inhibitors, nuclear export inhibitors, proteasome inhibitors, topoisomerase I or II inhibitors, heat shock protein inhibitors, tyrosine kinase inhibitors, antibiotics, and anti-mitotic agents. In the ADC, the antibody and therapeutic agent preferably are conjugated via a linker cleavable such as a peptidyl, disulfide, or hydrazone linker. More preferably, the linker is a peptidyl linker such as Val-Cit, Ala-Val, Val-Ala-Val, Lys-Lys, Pro-Val-Gly-Val-Val (SEQ ID NO: 219), Ala-Asn-Val, Val-Leu-Lys, Ala-Ala-Asn, Cit-Cit, Val-Lys, Lys, Cit, Ser, or Glu. The ADCs can be prepared as described in U.S. Pat. Nos. 7,087,600; 6,989,452; and 7,129,261; PCT Publications WO 02/096910; WO 07/038658; WO 07/051081; WO 07/059404; WO 08/083312; and WO 08/103693; U.S. Patent Publications 20060024317; 20060004081; and 20060247295; the disclosures of which are incorporated herein by reference. Other uses for anti-CD73 antibodies, e.g., as monotherapy, are provided elsewhere herein, e.g., in the section pertaining to combination treatments.

[0571] More specifically, in an ADC, the antibody is conjugated to a drug, with the antibody functioning as a targeting agent for directing the ADC to a target cell expressing its antigen, such as a cancer cell. Preferably, the antigen is a tumor associated antigen, i.e., one that is uniquely expressed or overexpressed by the cancer cell. Once there, the drug is released, either inside the target cell or in its vicinity, to act as a therapeutic agent. For a review on the mechanism of action and use of ADCs in cancer therapy, see Schrama et al., Nature Rev. Drug Disc. 2006, 5, 147.

[0572] For cancer treatment, the drug preferably is a cytotoxic drug that causes death of the targeted cancer cell. Cytotoxic drugs that can be used in ADCs include the following types of compounds and their analogs and derivatives:
[0573] (a) enediynes such as calicheamicin (see, e.g., Lee et al., J. Am. Chem. Soc. 1987, 109, 3464 and 3466) and uncialamycin (see, e.g., Davies et al., WO 2007/038868 A2 (2007) and Chowdari et al., U.S. Pat. No. 8,709,431 B2 (2012));
[0574] (b) tubulysins (see, e.g., Domling et al., U.S. Pat. No. 7,778,814 B2 (2010); Cheng et al., U.S. Pat. No. 8,394,922 B2 (2013); and Cong et al., US 2014/0227295 A1;
[0575] (c) CC-1065 and duocarmycin (see, e.g., Boger, U.S. Pat. No. 6,5458,530 B1 (2003); Sufi et al., U.S. Pat. No. 8,461,117 B2 (2013); and Zhang et al., US 2012/0301490 A1 (2012));
[0576] (d) epothilones (see, e.g., Vite et al., US 2007/0275904 A1 (2007) and U.S. RE42930 E (2011));
[0577] (e) auristatins (see, e.g., Senter et al., U.S. Pat. No. 6,844,869 B2 (2005) and Doronina et al., U.S. Pat. No. 7,498,298 B2 (2009));
[0578] (f) pyrrolobezodiazepine (PBD) dimers (see, e.g., Howard et al., US 2013/0059800 A1(2013); US 2013/0028919 A1 (2013); and WO 2013/041606 A1 (2013)); and
[0579] (g) maytansinoids such as DM1 and DM4 (see, e.g., Chari et al., U.S. Pat. No. 5,208,020 (1993) and Amphlett et al., U.S. Pat. No. 7,374,762 B2 (2008)).

### XV. Bispecific Molecules

[0580] Antibodies described herein may be used for forming bispecific molecules. An anti-CD73 antibody, or antigen-binding portions thereof, can be derivatized or linked to another functional molecule, e.g., another peptide or protein (e.g., another antibody or ligand for a receptor) to generate a bispecific molecule that binds to at least two different binding sites or target molecules. The antibody described herein may in fact be derivatized or linked to more than one other functional molecule to generate multispecific molecules that bind to more than two different binding sites and/or target molecules; such multispecific molecules are also intended to be encompassed by the term “bispecific molecule” as used herein. To create a bispecific molecule described herein, an antibody described herein can be functionally linked (e.g., by chemical coupling, genetic fusion, noncovalent association or otherwise) to one or more other binding molecules, such as another antibody, antibody fragment, peptide or binding mimetic, such that a bispecific molecule results.

[0581] Accordingly, provided herein are bispecific molecules comprising at least one first binding specificity for CD73 and a second binding specificity for a second target epitope. In an embodiment described herein in which the bispecific molecule is multispecific, the molecule can further include a third binding specificity.

[0582] In one embodiment, the bispecific molecules described herein comprise as a binding specificity at least one antibody, or an antibody fragment thereof, including, e.g., an Fab, Fab′, F(ab′)₂, Fv, or a single chain Fv. The antibody may also be a light chain or heavy chain dimer, or any minimal fragment thereof such as a Fv or a single chain construct as described in Ladner et al. U.S. Pat. No. 4,946,778, the contents of which is expressly incorporated by reference.

[0583] Binding of the bispecific molecules to their specific targets can be confirmed using art-recognized methods, such as enzyme-linked immunosorbent assay (ELISA), radioimmunoassay (RIA), FACS analysis, bioassay (e.g., growth inhibition), or Western Blot assay. Each of these assays generally detects the presence of protein-antibody complexes of particular interest by employing a labeled reagent (e.g., an antibody) specific for the complex of interest.

### XVI. Compositions

[0584] Further provided are compositions, e.g., a pharmaceutical compositions, containing one or a combination of anti-CD73 antibodies, or antigen-binding portion(s) thereof, described herein, formulated together with a pharmaceutically acceptable carrier. Such compositions may include one or a combination of (e.g., two or more different) antibodies, or immunoconjugates or bispecific molecules described herein. For example, a pharmaceutical composition described herein can comprise a combination of antibodies (or immunoconjugates or bispecifics) that bind to different epitopes on the target antigen or that have complementary activities.

[0585] In certain embodiments, a composition comprises an anti-CD73 antibody at a concentration of at least 1 mg/ml, 5 mg/ml, 10 mg/ml, 50 mg/ml, 100 mg/ml, 150 mg/ml, 200 mg/ml, 1-300 mg/ml, or 100-300 mg/ml.

[0586] Pharmaceutical compositions described herein also can be administered in combination therapy, i.e., combined with other agents. For example, the combination therapy can include an anti-CD73 antibody described herein combined with at least one other anti-cancer and/or T-cell stimulating (e.g., activating) agent. Examples of therapeutic agents that can be used in combination therapy are described in greater detail below in the section on uses of the antibodies described herein.

[0587] In some embodiments, therapeutic compositions disclosed herein can include other compounds, drugs, and/or agents used for the treatment of cancer. Such compounds, drugs, and/or agents can include, for example, chemotherapy drugs, small molecule drugs or antibodies that stimulate the immune response to a given cancer. In some instances, therapeutic compositions can include, for example, one or more of the agents listed in the section on combination therapies.

[0588] As used herein, “pharmaceutically acceptable carrier” includes any and all solvents, dispersion media, coatings, antibacterial and antifungal agents, isotonic and absorption delaying agents, and the like that are physiologically compatible. Preferably, the carrier is suitable for intravenous, intramuscular, subcutaneous, parenteral, spinal or epidermal administration (e.g., by injection or infusion). Depending on the route of administration, the active compound, i.e., antibody, immunoconjugate, or bispecific molecule, may be coated in a material to protect the compound from the action of acids and other natural conditions that may inactivate the compound.

[0589] The pharmaceutical compounds described herein may include one or more pharmaceutically acceptable salts. A “pharmaceutically acceptable salt” refers to a salt that retains the desired biological activity of the parent compound and does not impart any undesired toxicological effects (see e.g., Berge, S. M., et al. (1977) J. Pharm. Sci. 66:1-19). Examples of such salts include acid addition salts and base addition salts. Acid addition salts include those derived from nontoxic inorganic acids, such as hydrochloric, nitric, phosphoric, sulfuric, hydrobromic, hydroiodic, phosphorous and the like, as well as from nontoxic organic acids such as aliphatic mono- and dicarboxylic acids, phenyl-substituted alkanoic acids, hydroxy alkanoic acids, aromatic acids, aliphatic and aromatic sulfonic acids and the like. Base addition salts include those derived from alkaline earth metals, such as sodium, potassium, magnesium, calcium and the like, as well as from nontoxic organic amines, such as N,N′-dibenzylethylenediamine, N-methylglucamine, chloroprocaine, choline, diethanolamine, ethylenediamine, procaine and the like.

[0590] A pharmaceutical composition described herein also may include a pharmaceutically acceptable anti-oxidant. Examples of pharmaceutically acceptable antioxidants include: (1) water soluble antioxidants, such as ascorbic acid, cysteine hydrochloride, sodium bisulfate, sodium metabisulfite, sodium sulfite and the like; (2) oil-soluble antioxidants, such as ascorbyl palmitate, butylated hydroxyanisole (BHA), butylated hydroxytoluene (BHT), lecithin, propyl gallate, alpha-tocopherol, and the like; and (3) metal chelating agents, such as citric acid, ethylenediamine tetraacetic acid (EDTA), sorbitol, tartaric acid, phosphoric acid, and the like.

[0591] Examples of suitable aqueous and nonaqueous carriers that may be employed in the pharmaceutical compositions described herein include water, ethanol, polyols (such as glycerol, propylene glycol, polyethylene glycol, and the like), and suitable mixtures thereof, vegetable oils, such as olive oil, and injectable organic esters, such as ethyl oleate. Proper fluidity can be maintained, for example, by the use of coating materials, such as lecithin, by the maintenance of the required particle size in the case of dispersions, and by the use of surfactants.

[0592] These compositions may also contain adjuvants such as preservatives, wetting agents, emulsifying agents and dispersing agents. Prevention of presence of microorganisms may be ensured both by sterilization procedures, supra, and by the inclusion of various antibacterial and antifungal agents, for example, paraben, chlorobutanol, phenol sorbic acid, and the like. It may also be desirable to include isotonic agents, such as sugars, sodium chloride, and the like into the compositions. In addition, prolonged absorption of the injectable pharmaceutical form may be brought about by the inclusion of agents which delay absorption such as aluminum monostearate and gelatin.

[0593] Pharmaceutically acceptable carriers include sterile aqueous solutions or dispersions and sterile powders for the extemporaneous preparation of sterile injectable solutions or dispersion. The use of such media and agents for pharmaceutically active substances is known in the art. Except insofar as any conventional media or agent is incompatible with the active compound, use thereof in the pharmaceutical compositions described herein is contemplated. Supplementary active compounds can also be incorporated into the compositions.

[0594] Therapeutic compositions typically must be sterile and stable under the conditions of manufacture and storage. The composition can be formulated as a solution, microemulsion, liposome, or other ordered structure suitable to high drug concentration. The carrier can be a solvent or dispersion medium containing, for example, water, ethanol, polyol (for example, glycerol, propylene glycol, and liquid polyethylene glycol, and the like), and suitable mixtures thereof. The proper fluidity can be maintained, for example, by the use of a coating such as lecithin, by the maintenance of the required particle size in the case of dispersion and by the use of surfactants. In many cases, it will be preferable to include isotonic agents, for example, sugars, polyalcohols such as mannitol, sorbitol, or sodium chloride in the composition. Prolonged absorption of the injectable compositions can be brought about by including in the composition an agent that delays absorption, for example, monostearate salts and gelatin.

[0595] Sterile injectable solutions can be prepared by incorporating the active compound in the required amount in an appropriate solvent with one or a combination of ingredients enumerated above, as required, followed by sterilization microfiltration. Generally, dispersions are prepared by incorporating the active compound into a sterile vehicle that contains a basic dispersion medium and the required other ingredients from those enumerated above. In the case of sterile powders for the preparation of sterile injectable solutions, the preferred methods of preparation are vacuum drying and freeze-drying (lyophilization) that yield a powder of the active ingredient plus any additional desired ingredient from a previously sterile-filtered solution thereof.

[0596] The amount of active ingredient which can be combined with a carrier material to produce a single dosage form will vary depending upon the subject being treated, and the particular mode of administration. The amount of active ingredient which can be combined with a carrier material to produce a single dosage form will generally be that amount of the composition which produces a therapeutic effect. Generally, out of one hundred percent, this amount will range from about 0.01 percent to about ninety-nine percent of active ingredient, preferably from about 0.1 percent to about 70 percent, most preferably from about 1 percent to about 30 percent of active ingredient in combination with a pharmaceutically acceptable carrier.

[0597] Dosage regimens are adjusted to provide the optimum desired response (e.g., a therapeutic response). For example, a single bolus may be administered, several divided doses may be administered over time or the dose may be proportionally reduced or increased as indicated by the exigencies of the therapeutic situation. It is especially advantageous to formulate parenteral compositions in dosage unit form for ease of administration and uniformity of dosage. Dosage unit form as used herein refers to physically discrete units suited as unitary dosages for the subjects to be treated; each unit contains a predetermined quantity of active compound calculated to produce the desired therapeutic effect in association with the required pharmaceutical carrier. The specification for the dosage unit forms described herein are dictated by and directly dependent on (a) the unique characteristics of the active compound and the particular therapeutic effect to be achieved, and (b) the limitations inherent in the art of compounding such an active compound for the treatment of sensitivity in individuals.

[0598] For administration of the anti-CD73 antibody, the dosage ranges from about 0.0001 to 100 mg/kg, and more usually 0.01 to 5 mg/kg, of the host body weight. For example dosages can be 0.3 mg/kg body weight, 1 mg/kg body weight, 3 mg/kg body weight, 5 mg/kg body weight or 10 mg/kg body weight or within the range of 1-10 mg/kg. An exemplary treatment regime entails administration once per week, once every two weeks, once every three weeks, once every four weeks, once a month, once every 3 months or once every three to 6 months.

[0599] In certain embodiments, the anti-CD73 antibody and immuno-oncology agent are administered at a fixed dose. Accordingly, in certain embodiments, the anti-CD73 antibody, e.g., CD73.4IgG2C219S.IgG1.1f or MEDI19447, is administered at a fixed dose of about 25 to about 1600 mg, for example about 50 to about 1600 mg, about 100 to about 1600 mg, about 150 to about 1600 mg, about 300 to about 1600 mg, about 400 to about 1600 mg, about 600 to about 1600 mg, about 1200 to about 1600 mg, about 50 to about 1200 mg, about 50 to about 600 mg, about 50 to about 400 mg, about 50 to about 300 mg, about 50 to about 150 mg, about 150 mg to about 1200 mg, about 150 mg to about 600 mg, about 150 to about 400 mg, about 150 to about 300 mg, about 300 to about 1200 mg, about 300 to about 600 mg, about 400 mg to about 1200 mg, about 400 to about 600 mg, or about 600 to about 1200 mg. For example, dosages of the anti-CD73 antibody can be about 150 mg, about 300 mg, about 400 mg, about 600 mg, about 1200 mg, or about 1600 mg.

[0600] In certain embodiments, the anti-CD73 antibody is administered to a patient at a dose sufficient to achieve a steady-state trough concentration of about 250 nM to about 1 mM, about 300 nM to about 1 mM, about 350 nM to about 1 mM, about 400 nM to about 1 mM, about 450 nM to about 1 mM, about 500 nM to about 1 mM, about 550 nM to about 1 mM, about 600 nM to about 1 mM, about 650 nM to about 1 mM, about 700 nM to about 1 mM, about 750 nM to about 1 mM about 800 nM to about 1 mM, about 850 nM to about 1 mM, about 900 mM to about 1 mM, or about 500 nM to about 800 nM.

[0601] In certain embodiments, the immuno-oncology agent (e.g., an anti-PD-1 antibody, such as nivolumab or pembrolizumab or others described herein, or PD-L1 antibody) is administered at a fixed dose of about 50 mg to about 1000 mg, for example, about 50 mg to about 500 mg; about 100 mg to about 500 mg; about 200 mg to about 500 mg; about 200 mg to about 400 mg; about 100 to about 300 mg or about 300 mg to about 400 mg, For example, the dosage of the immuno-oncology agent can be about 240 mg or about 360 mg. In certain embodiments, the dose of the immuno-oncology agent ranges from about 0.0001 to 100 mg/kg, and more usually 0.01 to 5 mg/kg, of the host body weight. For example dosages can be 0.3 mg/kg body weight, 1 mg/kg body weight, 3 mg/kg body weight, 5 mg/kg body weight or 10 mg/kg body weight or within the range of 1-10 mg/kg.

[0602] In certain embodiments, the dosage of the immuno-oncology agent, e.g., an anti-PD-L1 antibody or an anti-PD-1 antibody, such as nivolumab or pembrolizumab, is 240 mg administered once every 2 weeks (Q2W). This dosage can be adjusted proportionately (at 120 mg per week) for longer or shorter periods, e.g., 360 mg administered once every 3 weeks (Q3W) or 480 mg administered once every 4 weeks (Q4W).

[0603] In certain embodiments, the anti-CD73 antibody is administered to a patient with an infusion duration of about 45 minutes to 75 minutes (e.g., about 1 hour) for doses of 150 to 800 mg, and about 100 minutes to 140 minutes (e.g., about 2 hours) for doses>800 mg.

[0604] In certain embodiments, the immuno-oncology agent is administered to a patient with an infusion duration of about 15 minutes to 45 minutes, for example, 30 minutes, when administered at a dose of 3 mg/kg. In certain embodiments, the immuno-oncology agent is administered to a patient with an infusion duration of about 45 minutes to 75 minutes, for example, 60 minutes, when administered at a dose of 10 mg/kg.

[0605] In certain embodiments, when administered on the same day, the anti-CD73 antibody is administered before the immuno-oncology agent. In certain embodiments, when administered on the same day, the anti-CD73 antibody is administered after the immuno-oncology agent. In certain embodiments, when administered on the same day, the anti-CD73 antibody is administered simultaneously with the immuno-oncology agent. In certain embodiments, when administered on the same day, the anti-CD73 antibody is administered about 15 to 45 minutes (e.g., about 30 minutes) before the immuno-oncology agent. In certain embodiments, when administered on the same day, the anti-CD73 antibody is administered about 15 to 45 minutes (e.g., about 30 minutes) after the immuno-oncology agent.

[0606] Suitable treatment protocols for treating a solid tumor in a human patient include, for example, administering to the patient an effective amount of each of:

[0607] (a) an anti-CD73 antibody described herein, and

[0608] (b) an immuno-oncology agent,

[0609] wherein the anti-CD73 antibody is administered on the same day as the immune-oncology agent, and they are administered every week, every 2 weeks, every 3 weeks, or every 4 weeks. For example, an anti-CD73 antibody and an immuno-oncology agent may be administered to a subject having cancer (e.g., advanced cancer), every 2 weeks at a flat dose of anti-CD73 antibody of about 100-2000 mg (e.g., 150-1600 mg, e.g., about 100, 150, 200, 300, 500, 600, 800, 1000, 1200, or 1600 mg) and a flat dose of 50-2000 mg of immuno-oncology agent (e.g., 150-1600 mg, e.g., about 100, 150, 200, 300, 500, 600, 800, 1000, 1200, or 1600 mg). If the immuno-oncology agent is nivolumab, it may be administered at a flat dose of about 240 mg. In one embodiment, anti-CD73 antibody CD73.4.IgG2C219S.IgG1.1f (SEQ ID NO: 133 and or 189 for the heavy chain, and SEQ ID NO: 102 for the light chain) is administered to a subject having cancer every two weeks at a flat dose of 150-1600 mg and nivolumab is administered to the subject every two weeks (same days as anti-CD73 antibody) at a fixed dose of 240 mg. The combination treatment may be administered for 1-10 cycles, e.g., for 1, 2, 3, 4, 5 or 6, 7, 8, 9 or 10 cycles, wherein each cycle is a period of 28 days, wherein for each cycle, 2 doses of each antibody are administered. For example, the combination may be administered for 4-6 cycles, wherein each cycle is a period of 28 days, wherein for each cycle, 2 doses of each antibody are administered. Further cycles may be administered, e.g., after a period of rest.

[0610] In certain embodiments, the anti-CD73 antibody and the immuno-oncology agent are administered once per week, wherein, e.g., the anti-CD73 antibody and the immuno-oncology agent are administered on the same day.

[0611] In certain embodiments, the anti-CD73 antibody is administered once per week, and the immuno-oncology agent is administered every 2 or 3 weeks. For example, the anti-CD73 antibody may be administered to a subject having cancer (e.g., advanced cancer) every week at a flat dose of about 100-2000 mg (e.g., 150-1600 mg, e.g., about 100, 150, 200, 300, 500, 600, 800, 1000, 1200, or 1600 mg) and the immuno-oncology agent is administered at a flat dose of 50-2000 mg (e.g., 150-1600 mg, e.g., about 100, 150, 200, 300, 500, 600, 800, 1000, 1200, or 1600 mg) every 2 or 3 weeks. If the immuno-oncology agent is nivolumab, it may be administered at a flat dose of about 240 mg every 2 weeks or at a flat dose of 360 mg every 3 weeks. In certain embodiments, anti-CD73 antibody and the immuno-oncology agent are given on the same day every two weeks and anti-CD73 antibody is administered alone every week that they are not co-administered. The combination treatment may be administered for 1-10 cycles, e.g., for 1, 2, 3, 4, 5 or 6, 7, 8, 9 or 10 cycles, wherein each cycle is a period of 28 days, wherein for each cycle, 4 doses of anti-CD73 antibody and 2 doses of immuno-oncology agent are administered. For example, the combination may be administered for 4-6 cycles. Further cycles may be administered, e.g., after a period of rest.

[0612] In certain embodiments, an anti-CD73 antibody and an immuno-oncology agent are administered to a subject having cancer (e.g., advanced cancer), every 3 weeks at a flat dose of anti-CD73 antibody of about 100-2000 mg (e.g., 150-1600 mg, e.g., about 100, 150, 200, 300, 500, 600, 800, 1000, 1200, or 1600 mg) and a flat dose of 50-2000 mg of immuno-oncology agent (e.g., 150-1600 mg, e.g., about 100, 150, 200, 300, 500, 600, 800, 1000, 1200, or 1600 mg). If the immuno-oncology agent is nivolumab, it may be administered at a flat dose of about 360 mg every three weeks. In one embodiment, anti-CD73 antibody CD73.4.IgG2C219S.IgG1.1f is administered to a subject having cancer every three weeks at a flat dose of 150-1600 mg and nivolumab is administered to the subject every three weeks (same days as anti-CD73 antibody) at a fixed dose of 360 mg. Both agents may be administered on the same day. The combination treatment may be administered for 1-10 cycles, e.g., for 1, 2, 3, 4, 5 or 6, 7, 8, 9 or 10 cycles, wherein each cycle is a period of 42 days, wherein for each cycle, 2 doses of each antibody are administered every three weeks. For example, the combination may be administered for 4-6 cycles, wherein each cycle is a period of 42 days, wherein for each cycle, 2 doses of each antibody are administered on the same day. Further cycles may be administered, e.g., after a period of rest.

[0613] In certain embodiments, the anti-CD73 antibody CD73.4.IgG2C219S.IgG1.1f and nivolumab are administered at one of following combination doses: 50 mg of anti-CD73 antibody and 240 mg of nivolumab every two weeks; 50 mg of anti-CD73 antibody and 360 mg of nivolumab every three weeks; 150 mg of anti-CD73 antibody and 240 mg of nivolumab every two weeks; 150 mg of anti-CD73 antibody and 360 mg of nivolumab every three weeks; 300 mg of anti-CD73 antibody and 240 mg of nivolumab every two weeks; 300 mg of anti-CD73 antibody and 360 mg of nivolumab every three weeks; 600 mg of anti-CD73 antibody and 240 mg of nivolumab every two weeks; 600 mg of anti-CD73 antibody and 360 mg of nivolumab every three weeks; 1200 mg of anti-CD73 antibody and 240 mg of nivolumab every two weeks; 1200 mg of anti-CD73 antibody and 360 mg of nivolumab every three weeks; 1600 mg of anti-CD73 antibody and 240 mg of nivolumab every two weeks; 1600 mg of anti-CD73 antibody and 360 mg of nivolumab every three weeks; 2000 mg of anti-CD73 antibody and 240 mg of nivolumab every two weeks; 2000 mg of anti-CD73 antibody and 360 mg of nivolumab every three weeks; 50 mg of anti-CD73 antibody every week and 240 mg of nivolumab every two weeks; 50 mg of anti-CD73 antibody every week and 360 mg of nivolumab every three weeks; 150 mg of anti-CD73 antibody every week and 240 mg of nivolumab every two weeks; 150 mg of anti-CD73 antibody every week and 360 mg of nivolumab every three weeks; 300 mg of anti-CD73 antibody every week and 240 mg of nivolumab every two weeks; 300 mg of anti-CD73 antibody every week and 360 mg of nivolumab every three weeks; 600 mg of anti-CD73 antibody every week and 240 mg of nivolumab every two weeks; 600 mg of anti-CD73 antibody every week and 360 mg of nivolumab every three weeks; 1200 mg of anti-CD73 antibody every week and 240 mg of nivolumab every two weeks; 1200 mg of anti-CD73 antibody every week and 360 mg of nivolumab every three weeks; 1600 mg of anti-CD73 antibody every week and 240 mg of nivolumab every two weeks; 1600 mg of anti-CD73 antibody every week and 360 mg of nivolumab every three weeks; 2000 mg of anti-CD73 antibody every week and 240 mg of nivolumab every two weeks; 2000 mg of anti-CD73 antibody every week and 360 mg of nivolumab every three weeks. Treatment may be preceded or followed by a period of treatment with either anti-CD73 and/or or the immuno-oncology agent alone. For example, anti-CD73 may be administered alone for 1, 2, 3 or 4 weeks prior to starting the combination treatment. In certain embodiments, the immuno-oncology agent is administered alone for 1, 2, 3, 4 or more weeks, after the combination treatment.

[0614] In some methods, two or more monoclonal antibodies with different binding specificities are administered simultaneously, in which case the dosage of each antibody administered falls within the ranges indicated. Antibody is usually administered on multiple occasions. Intervals between single dosages can be, for example, weekly, monthly, every three months or yearly. Intervals can also be irregular as indicated by measuring blood levels of antibody to the target antigen in the patient. In some methods, dosage is adjusted to achieve a plasma antibody concentration of about 1-1000 μg/ml and in some methods about 25-300 μg/ml.

[0615] All anti-CD73 antibodies described herein or referred to herein (e.g., MEDI9447 or Phen 0203hIgG1, described in WO2016/075099 and an anti-CD73 antibody described in WO2016/055609) may be combined and/or administered and/or used as described herein.

[0616] An antibody can be administered as a sustained release formulation, in which case less frequent administration is required. Dosage and frequency vary depending on the half-life of the antibody in the patient. In general, human antibodies show the longest half-life, followed by humanized antibodies, chimeric antibodies, and nonhuman antibodies. The dosage and frequency of administration can vary depending on whether the treatment is prophylactic or therapeutic. In prophylactic applications, a relatively low dosage is administered at relatively infrequent intervals over a long period of time. Some patients continue to receive treatment for the rest of their lives. In therapeutic applications, a relatively high dosage at relatively short intervals is sometimes required until progression of the disease is reduced or terminated, and preferably until the patient shows partial or complete amelioration of symptoms of disease. Thereafter, the patient can be administered a prophylactic regime.

[0617] Actual dosage levels of the active ingredients in the pharmaceutical compositions described herein may be varied so as to obtain an amount of the active ingredient which is effective to achieve the desired therapeutic response for a particular patient, composition, and mode of administration, without being toxic to the patient. The selected dosage level will depend upon a variety of pharmacokinetic factors including the activity of the particular compositions described herein employed, or the ester, salt or amide thereof, the route of administration, the time of administration, the rate of excretion of the particular compound being employed, the duration of the treatment, other drugs, compounds and/or materials used in combination with the particular compositions employed, the age, sex, weight, condition, general health and prior medical history of the patient being treated, and like factors well known in the medical arts.

[0618] A “therapeutically effective dosage” of an anti-CD73 antibody described herein preferably results in a decrease in severity of disease symptoms, an increase in frequency and duration of disease symptom-free periods, or a prevention of impairment or disability due to the disease affliction. In the context of cancer, a therapeutically effective dose preferably prevents further deterioration of physical symptoms associated with cancer. Symptoms of cancer are well-known in the art and include, for example, unusual mole features, a change in the appearance of a mole, including asymmetry, border, color and/or diameter, a newly pigmented skin area, an abnormal mole, darkened area under nail, breast lumps, nipple changes, breast cysts, breast pain, death, weight loss, weakness, excessive fatigue, difficulty eating, loss of appetite, chronic cough, worsening breathlessness, coughing up blood, blood in the urine, blood in stool, nausea, vomiting, liver metastases, lung metastases, bone metastases, abdominal fullness, bloating, fluid in peritoneal cavity, vaginal bleeding, constipation, abdominal distension, perforation of colon, acute peritonitis (infection, fever, pain), pain, vomiting blood, heavy sweating, fever, high blood pressure, anemia, diarrhea, jaundice, dizziness, chills, muscle spasms, colon metastases, lung metastases, bladder metastases, liver metastases, bone metastases, kidney metastases, and pancreatic metastases, difficulty swallowing, and the like.

[0619] A therapeutically effective dose may prevent or delay onset of cancer, such as may be desired when early or preliminary signs of the disease are present. Laboratory tests utilized in the diagnosis of cancer include chemistries (including the measurement of CD73 levels), hematology, serology and radiology. Accordingly, any clinical or biochemical assay that monitors any of the foregoing may be used to determine whether a particular treatment is a therapeutically effective dose for treating cancer. One of ordinary skill in the art would be able to determine such amounts based on such factors as the subject's size, the severity of the subject's symptoms, and the particular composition or route of administration selected.

[0620] A composition described herein can be administered via one or more routes of administration using one or more of a variety of methods known in the art. As will be appreciated by the skilled artisan, the route and/or mode of administration will vary depending upon the desired results. Preferred routes of administration for antibodies described herein include intravenous, intramuscular, intradermal, intraperitoneal, subcutaneous, spinal or other parenteral routes of administration, for example by injection or infusion. The phrase “parenteral administration” as used herein means modes of administration other than enteral and topical administration, usually by injection, and includes, without limitation, intravenous, intramuscular, intraarterial, intrathecal, intracapsular, intraorbital, intracardiac, intradermal, intraperitoneal, transtracheal, subcutaneous, subcuticular, intraarticular, subcapsular, subarachnoid, intraspinal, epidural and intrasternal injection and infusion.

[0621] Alternatively, an antibody described herein can be administered via a non-parenteral route, such as a topical, epidermal or mucosal route of administration, for example, intranasally, orally, vaginally, rectally, sublingually or topically.

[0622] The active compounds can be prepared with carriers that will protect the compound against rapid release, such as a controlled release formulation, including implants, transdermal patches, and microencapsulated delivery systems. Biodegradable, biocompatible polymers can be used, such as ethylene vinyl acetate, polyanhydrides, polyglycolic acid, collagen, polyorthoesters, and polylactic acid. Many methods for the preparation of such formulations are patented or generally known to those skilled in the art. See, e.g., Sustained and Controlled Release Drug Delivery Systems, J. R. Robinson, ed., Marcel Dekker, Inc., New York, 1978.

[0623] Therapeutic compositions can be administered with medical devices known in the art. For example, in a preferred embodiment, a therapeutic composition described herein can be administered with a needleless hypodermic injection device, such as the devices disclosed in U.S. Pat. Nos. 5,399,163; 5,383,851; 5,312,335; 5,064,413; 4,941,880; 4,790,824; or 4,596,556. Examples of well-known implants and modules for use with anti-CD73 antibodies described herein include: U.S. Pat. No. 4,487,603, which discloses an implantable micro-infusion pump for dispensing medication at a controlled rate; U.S. Pat. No. 4,486,194, which discloses a therapeutic device for administering medicants through the skin; U.S. Pat. No. 4,447,233, which discloses a medication infusion pump for delivering medication at a precise infusion rate; U.S. Pat. No. 4,447,224, which discloses a variable flow implantable infusion apparatus for continuous drug delivery; U.S. Pat. No. 4,439,196, which discloses an osmotic drug delivery system having multi-chamber compartments; and U.S. Pat. No. 4,475,196, which discloses an osmotic drug delivery system. These patents are incorporated herein by reference. Many other such implants, delivery systems, and modules are known to those skilled in the art.

[0624] In certain embodiments, the anti-CD73 antibodies described herein can be formulated to ensure proper distribution in vivo. For example, the blood-brain barrier (BBB) excludes many highly hydrophilic compounds. To ensure that the therapeutic compounds described herein cross the BBB (if desired), they can be formulated, for example, in liposomes. For methods of manufacturing liposomes, see, e.g., U.S. Pat. Nos. 4,522,811; 5,374,548; and 5,399,331. The liposomes may comprise one or more moieties which are selectively transported into specific cells or organs, thus enhance targeted drug delivery (see, e.g., V. V. Ranade (1989) J. Clin. Pharmacol. 29:685). Exemplary targeting moieties include folate or biotin (see, e.g., U.S. Pat. No. 5,416,016 to Low et al.); mannosides (Umezawa et al., (1988) Biochem. Biophys. Res. Commun. 153:1038); antibodies (P. G. Bloeman et al. (1995) FEBS Lett. 357:140; M. Owais et al. (1995) Antimicrob. Agents Chemother. 39:180); surfactant protein A receptor (Briscoe et al. (1995) Am. J. Physiol. 1233:134); p 120 (Schreier et al. (1994) J. Biol. Chem. 269:9090); see also K. Keinanen; M. L. Laukkanen (1994) FEBS Lett. 346:123; J. J. Killion; I. J. Fidler (1994) Immunomethods 4:273.

### XVII. Uses and Methods

[0625] The antibodies, antibody compositions and methods described herein have numerous in vitro and in vivo applications, e.g., inhibiting tumor growth, inhibiting tumor metastasis, enhancing of immune response by, e.g., reducing adenosine signaling, or detection of CD73. In a preferred embodiment, the antibodies described herein are human antibodies. For example, anti-CD73 antibodies described herein can be administered to cells in culture, in vitro or ex vivo, or to human subjects, e.g., in vivo, to inhibit tumor cell proliferation. Accordingly, provided herein are methods of modifying tumor growth in a subject comprising administering to the subject an antibody, or antigen-binding portion thereof, described herein such that the tumor growth in the subject is reduced.

[0626] In a particular embodiment, the methods are particularly suitable for treatment of cancer in vivo. To achieve antigen-specific inhibition of tumor growth, anti-CD73 antibodies described herein can be administered together with an antigen of interest or the antigen may already be present in the subject to be treated (e.g., a tumor-bearing subject). When antibodies to CD73 are administered together with another agent, the two can be administered separately or simultaneously.

[0627] Also encompassed are methods for detecting the presence of human CD73 antigen in a sample, or measuring the amount of human CD73 antigen, comprising contacting the sample, and a control sample, with a human monoclonal antibody, or an antigen binding portion thereof, which specifically binds to human CD73, under conditions that allow for formation of a complex between the antibody or portion thereof and human CD73. The formation of a complex is then detected, wherein a difference complex formation between the sample compared to the control sample is indicative the presence of human CD73 antigen in the sample. Moreover, the anti-CD73 antibodies described herein can be used to purify human CD73 via immunoaffinity purification.

[0628] In one embodiment, a method is provided for determining the level of soluble CD73 in the blood or serum of a subject, e.g., a subject having cancer. In certain embodiments, the level of soluble CD73 antibody in the blood or serum of a patient that is being treated with an anti-CD73 antibody is determined. For example, a method may comprise obtaining a sample from a subject prior to, during or both prior to and during the treatment with an anti-CD73 antagonist agent, e.g., a CD73 antibody (such as an antibody described herein), and contacting the sample with an agent that can detect soluble CD73, such as an anti-CD73 antibody described herein, and determine the level of soluble CD73 in the blood or serum. In certain embodiments, the agent that detects the soluble CD73 antigen is not the antibody (or does not comprise the same variable regions) that was administered to the subject for the treatment.

[0629] In certain embodiments, a method comprises determining the level of CD73 antagonist in the serum of a subject that is being treated with the CD73 antagonist, such as an antibody described herein, and if the level of the antibody is lower than the level of antibody after its administration to the subject, then administrating more CD73 antagonist to the subject. As described in the Examples, it has been shown that a lower level of CD73 antibody in the serum of animals injected with the anti-CD73 antibody correlates with the extent of inhibition of CD73 in the tumor.

[0630] Also provided herein are methods of determining whether a subject with cancer would respond to treatment with an anti-CD73 antagonist, comprising determining the level of CD73 in a tumor of the subject, wherein the presence of CD73 in the tumor indicates the subject is likely to respond to a treatment with an anti-CD73 antagonist.

[0631] Also provided herein are methods of determining whether a subject having cancer would respond to a treatment with an anti-CD73 antagonist and an immune-oncology agent, comprising determining the level of CD73 in a tumor and the level of the target of the immuno-oncology agent (e.g., a checkpoint inhibitor or co-stimulatory protein) in TILs of the tumor in the subject, wherein the presence of CD73 in the tumor and the presence of the target of the immuno-oncology agent in TILs indicates that the subject is likely to respond to treatment with an anti-CD73 antagonist and the immuno-oncology agent. The immune-oncology agent can be a PD-1 or PD-L1 antagonist.

[0632] In certain embodiments, the level of immuno-oncology target in TILs is measured by determining the level of the immuno-oncology target on CD8+ T cells, CD4+ FoxP3− T cells, or CD4+ FoxP3+ T cells, and if the immuno-oncology target expression is detected on one or more of these cells types, then the subject is likely to respond to a treatment with an anti-CD73 antagonist and the immuno-oncology agent.

[0633] Also provided herein are methods of determining whether a subject having cancer would respond to a treatment with an anti-CD73 antagonist and a PD-1 antagonist, comprising determining the level of CD73 in a tumor and the level of PD-1 in tumor infiltrating lymphocytes (TILs) of the tumor in the subject, wherein the presence of CD73 in the tumor and the presence of PD-1 in TILs indicates the subject is likely to respond to treatment with an anti-CD73 antagonist and anti-PD-1 antagonist.

[0634] In certain embodiments, the level of PD-1 in TILs is measured by determining the level of PD-1 on CD8+ T cells, CD4+ FoxP3− T cells, or CD4+ FoxP3+ T cells, and if PD-1 expression is detected on one or more of these cells types, then the subject is likely to respond to a treatment with an anti-CD73 antagonist and anti-PD-1 antagonist.

[0635] Also provided are methods for treating a subject having cancer (or a tumor), comprising (i) determining the level of expression of CD73 on tumor cells; and if CD73 is present on tumor cells, then (ii) administering to the subject a therapeutically effective amount of an antagonist of CD73, e.g., an antibody described herein. A method may comprise obtaining a tumor sample from a patient having cancer, determining the level of CD73 on tumor cells, and if CD73 is detected on tumor cells, administering to the subject a CD73 antagonist, and optionally another immuno-oncology agent.

[0636] Also provided are methods for treating a subject having cancer (or a tumor), comprising (i) determining the level of expression of CD73 on tumor cells; (ii) determining the level of the target of an immuno-oncology agent (e.g., PD-1) on TILs, and if CD73 is present on tumor cells and the target of an immune-oncology agent is present on TILs, then (iii) administering to the subject a therapeutically effective amount of an antagonist of CD73, e.g., an antibody described herein, and an immune-oncology agent targeting the target. A method may comprise obtaining a tumor sample from a patient having cancer, determining the level of CD73 on tumor cells, determining the level of PD-1 on TILs, and if CD73 is detected on tumor cells, and PD-1 is detected on TILs, then administer to the subject a CD73 antagonist and a PD-1 antagonist.

[0637] In certain embodiment, a method for treating a subject having cancer comprises administering an anti-CD73 antagonist to a subject having tumor cells that express CD73, to thereby treat the subject. A method for treating a subject having cancer may also comprise administering an anti-CD73 antagonist and an immuno-oncology agent (e.g., anti-PD-1 antibody) to a subject having tumor cells that express CD73 and TILs that express the target of the immuno-oncology agent (e.g., PD-1).

[0638] Further encompassed are methods of stimulating an immune response (e.g., an antigen-specific T cell response) in a subject comprising administering an anti-CD73 antibody described herein to the subject such that an immune response (e.g., an antigen-specific T cell response) in the subject is stimulated. In a preferred embodiment, the subject is a tumor-bearing subject and an immune response against the tumor is stimulated. A tumor may be a solid tumor or a liquid tumor, e.g., a hematological malignancy. In certain embodiments, a tumor is an immunogenic tumor. In certain embodiments, a tumor is non-immunogenic.

[0639] These and other methods described herein are discussed in further detail below.

### Cancer

[0640] Treatment of patients with an anti-CD73 antibody in combination with an immuno-oncology agent can reduce tumor growth and metastasis in a patient. Inhibition of CD73 by anti-CD73 antibodies can also enhance the immune response to cancerous cells in the patient. Provided herein are methods for treating a subject having cancer, comprising administering to the subject an anti-CD73 antibody described herein in combination with an immuno-oncology agent (e.g., an anti-PD-1 antibody), such that the subject is treated, e.g., such that growth of cancerous tumors is inhibited or reduced and/or that the tumors regress. An anti-CD73 antibody can be used in conjunction with another agent, e.g., other immunogenic agents, standard cancer treatments, or other antibodies, as described below.

[0641] Accordingly, provided herein are methods, e.g., clinical methods, of treating cancer, e.g., by inhibiting growth of tumor cells, in a subject, comprising administering to the subject a therapeutically effective amount of an anti-CD73 antibody (e.g., a human anti-CD73 antibody) described herein, or antigen-binding portion thereof, and an immuno-oncology agent. Additionally or alternatively, the antibody can be a chimeric or humanized anti-CD73 antibody, e.g., a chimeric or humanized anti-CD73 antibody comprising of an anti-CD73 antibody described herein, or antigen-binding portion thereof.

[0642] Combination therapies provided herein involve administration of an anti-CD73 antibody and an immuno-oncology agent, e.g., an antibody that binds to an inhibitory immune receptor, particularly an anti-PD-1 antibody, to treat subjects having tumors (e.g., advanced solid tumors).

[0643] In certain embodiments, provided herein are methods of treating cancer wherein an anti-CD73 antibody and an anti-PD-1 antibody are administered to a patient with a tumor (e.g., advanced solid tumor) according to a defined clinical dosage regimen. In certain embodiments, the anti-CD73 antibody is CD73.4.IgG2C219S.IgG1.1f (SEQ ID Nos: 133 or 189 for the heavy chain and SEQ ID NO: 102 for the light chain). In certain embodiments, the anti-PD-1 antibody is BMS-936558 (nivolumab). In certain embodiments, dosage regimens are adjusted to provide the optimum desired response (e.g., an effective response).

[0644] As used herein, adjunctive or combined administration (coadministration) includes simultaneous administration of the compounds in the same or different dosage form, or separate administration of the compounds (e.g., sequential administration). Thus, the anti-CD73 and anti-PD-1 antibodies can be simultaneously administered in a single formulation. Alternatively, the anti-CD73 and anti-PD-1 antibodies can be formulated for separate administration and are administered concurrently or sequentially (e.g., one antibody is administered within about 30 minutes prior to administration of the second antibody).

[0645] For example, the anti-PD1 antibody can be administered first and followed by (e.g., immediately followed by) the administration of the anti-CD73 antibody, or vice versa. In certain embodiments, the anti-PD-1 antibody is administered prior to administration of the anti-CD73 antibody. In another embodiment, the anti-PD-1 antibody is administered after administration of the anti-CD73 antibody. In another embodiment, the anti-CD73 antibody and anti-PD-1 antibody are administered concurrently. Such concurrent or sequential administration preferably results in both antibodies being simultaneously present in treated patients.

[0646] Cancers whose growth may be inhibited using a combination of the anti-CD73 antibodies and immuno-oncology agent described herein include cancers typically responsive to immunotherapy. Non-limiting examples of cancers for treatment include squamous cell carcinoma, small-cell lung cancer, non-small cell lung cancer, squamous non-small cell lung cancer (NSCLC), non NSCLC, glioma, gastrointestinal cancer, renal cancer (e.g. clear cell carcinoma), ovarian cancer, liver cancer, colorectal cancer, endometrial cancer, kidney cancer (e.g., renal cell carcinoma (RCC)), prostate cancer (e.g. hormone refractory prostate adenocarcinoma), thyroid cancer, neuroblastoma, pancreatic cancer, glioblastoma (glioblastoma multiforme), cervical cancer, stomach cancer, bladder cancer, hepatoma, breast cancer, colon carcinoma, and head and neck cancer (or carcinoma), gastric cancer, germ cell tumor, pediatric sarcoma, sinonasal natural killer, melanoma (e.g., metastatic malignant melanoma, such as cutaneous or intraocular malignant melanoma), bone cancer, skin cancer, uterine cancer, cancer of the anal region, testicular cancer, carcinoma of the fallopian tubes, carcinoma of the endometrium, carcinoma of the cervix, carcinoma of the vagina, carcinoma of the vulva, cancer of the esophagus, cancer of the small intestine, cancer of the endocrine system, cancer of the parathyroid gland, cancer of the adrenal gland, sarcoma of soft tissue, cancer of the urethra, cancer of the penis, solid tumors of childhood, cancer of the ureter, carcinoma of the renal pelvis, neoplasm of the central nervous system (CNS), primary CNS lymphoma, tumor angiogenesis, spinal axis tumor, brain stem glioma, pituitary adenoma, Kaposi's sarcoma, epidermoid cancer, squamous cell cancer, T-cell lymphoma, environmentally-induced cancers including those induced by asbestos, virus-related cancers (e.g., human papilloma virus (HPV)-related tumor), and hematologic malignancies derived from either of the two major blood cell lineages, i.e., the myeloid cell line (which produces granulocytes, erythrocytes, thrombocytes, macrophages and mast cells) or lymphoid cell line (which produces B, T, NK and plasma cells), such as all types of luekemias, lymphomas, and myelomas, e.g., acute, chronic, lymphocytic and/or myelogenous leukemias, such as acute leukemia (ALL), acute myelogenous leukemia (AML), chronic lymphocytic leukemia (CLL), and chronic myelogenous leukemia (CIVIL), undifferentiated AML (M0), myeloblastic leukemia (M1), myeloblastic leukemia (M2; with cell maturation), promyelocytic leukemia (M3 or M3 variant [M3V]), myelomonocytic leukemia (M4 or M4 variant with eosinophilia [M4E]), monocytic leukemia (M5), erythroleukemia (M6), megakaryoblastic leukemia (M7), isolated granulocytic sarcoma, and chloroma; lymphomas, such as Hodgkin's lymphoma (HL), non-Hodgkin's lymphoma (NHL), B-cell lymphomas, T-cell lymphomas, lymphoplasmacytoid lymphoma, monocytoid B-cell lymphoma, mucosa-associated lymphoid tissue (MALT) lymphoma, anaplastic (e.g., Ki 1+) large-cell lymphoma, adult T-cell lymphoma/leukemia, mantle cell lymphoma, angio immunoblastic T-cell lymphoma, angiocentric lymphoma, intestinal T-cell lymphoma, primary mediastinal B-cell lymphoma, precursor T-lymphoblastic lymphoma, T-lymphoblastic; and lymphoma/leukaemia (T-Lbly/T-ALL), peripheral T-cell lymphoma, lymphoblastic lymphoma, post-transplantation lymphoproliferative disorder, true histiocytic lymphoma, primary central nervous system lymphoma, primary effusion lymphoma, lymphoblastic lymphoma (LBL), hematopoietic tumors of lymphoid lineage, acute lymphoblastic leukemia, diffuse large B-cell lymphoma, Burkitt's lymphoma, follicular lymphoma, diffuse histiocytic lymphoma (DHL), immunoblastic large cell lymphoma, precursor B-lymphoblastic lymphoma, cutaneous T-cell lymphoma (CTLC) (also called mycosis fungoides or Sezary syndrome), and lymphoplasmacytoid lymphoma (LPL) with Waldenstrom's macroglobulinemia; myelomas, such as IgG myeloma, light chain myeloma, nonsecretory myeloma, smoldering myeloma (also called indolent myeloma), solitary plasmocytoma, and multiple myelomas, chronic lymphocytic leukemia (CLL), hairy cell lymphoma; hematopoietic tumors of myeloid lineage, tumors of mesenchymal origin, including fibrosarcoma and rhabdomyoscarcoma; seminoma, teratocarcinoma, tumors of the central and peripheral nervous, including astrocytoma, schwannomas; tumors of mesenchymal origin, including fibrosarcoma, rhabdomyoscaroma, and osteosarcoma; and other tumors, including melanoma, xeroderma pigmentosum, keratoacanthoma, seminoma, thyroid follicular cancer and teratocarcinoma, hematopoietic tumors of lymphoid lineage, for example T-cell and B-cell tumors, including but not limited to T-cell disorders such as T-prolymphocytic leukemia (T-PLL), including of the small cell and cerebriform cell type; large granular lymphocyte leukemia (LGL) preferably of the T-cell type; a/d T-NHL hepatosplenic lymphoma; peripheral/post-thymic T cell lymphoma (pleomorphic and immunoblastic subtypes); angiocentric (nasal) T-cell lymphoma; cancer of the head or neck, renal cancer, rectal cancer, cancer of the thyroid gland; acute myeloid lymphoma, as well as any combinations of said cancers. The methods described herein may also be used for treatment of metastatic cancers, refractory cancers (e.g., cancers refractory to previous immunotherapy, e.g., with a blocking CTLA-4 or PD-1 or PD-L1 antibody), and recurrent cancers.

[0647] The methods may be used for treating tumors or cancers that are CD73 positive, or which express high levels of CD73. A method may comprise first determining the level of CD73 on tumors or tumor cells, and treating with an anti-CD73 antibody, e.g, described herein, if the tumors or cells express CD73, e.g., high levels of CD73.

[0648] In certain embodiments, the patient to be treated has lung cancer. In certain embodiments, the patient to be treated has thyroid cancer. In certain embodiments, the patient to be treated has pancreatic cancer. In certain embodiments, the patient to be treated has endometrial cancer. In certain embodiments, the patient to be treated has colon cancer. In certain embodiments, the patient to be treated has lung squamous cell cancer. In certain embodiments, the patient to be treated has head and neck squamous cell cancer. In certain embodiments, the patient to be treated has ovarian cancer (e.g., epithelial ovarian cancer, primary peritoneal carcinoma, fallopian tube cancer). In certain embodiments, the patient to be treated has gastric cancer (e.g., gastroesophageal junction tumors). In certain embodiments, the patient to be treated has a biopsy-accessible lesion. In certain embodiments, the patient has a tumor that expresses CD73. In certain embodiments, the patient has a tumor that expresses high levels of CD73, e.g., higher levels of CD73 relative to the level of CD73 in healthy tissue of the same etiology as that of the tumor.

[0649] In certain embodiments, the patient has a tumor that expresses CD73 and tumor infiltrating lymphocytes (TILs) in the tumor that express PD-1. In certain embodiments, the patient has a tumor that expresses high levels of CD73 and TILs that express high levels of PD-1.

[0650] In certain embodiments, the patient has a tumor that expresses CD73 and A2A adenosine receptor (A2AR). In certain embodiments, the patient has a tumor that expresses CD73 and A2AR and TILs that express PD-1. In certain embodiments, the patient has a tumor that expresses high levels of CD73 and A2AR and TILs that express high levels of PD-1.

[0651] Levels of expression of CD73 and A2AR in tumors, and PD-1 in TILs can be determined using standard methods in the art, e.g., immunohistochemistry or quantification of mRNA levels.

[0652] In certain embodiments, the treatment produces at least one therapeutic effect chosen from a reduction in size of a tumor, reduction in number of metastatic lesions over time, complete response, partial response, and stable disease.

[0653] With respect to target lesions, responses to therapy may include:

| | |
|---|---|
| Complete | Disappearance of all target lesions. Any |
| Response (CR) | pathological lymph nodes (whether target |
| (RECIST V1.1) | or non-target) must have reduction in short |
| | axis to < 10 mm. |
| Partial Response | At least a 30% decrease in the sum of the |
| (PR) | diameters of target lesions, taking as |
| (RECIST V1.1) | reference the baseline sum diameters. |
| Progressive | At least a 20% increase in the sum of the |
| Disease | diameters of target lesions, taking as |
| (PD) | reference the smallest sum on study (this |
| (RECIST V1.1) | includes the baseline sum if that is the |
| | smallest on study). In addition to the |
| | relative increase of 20%, the sum must also |
| | demonstrate an absolute increase of at least |
| | 5 mm. (Note: the appearance of one or |
| | more new lesions is also considered |
| | progression). |
| Stable Disease | Neither sufficient shrinkage to qualify for |
| (SD) | PR nor sufficient increase to qualify for |
| (RECIST V1.1) | PD, taking as reference the smallest sum |
| | diameters while on study. |
| Immune-related | Disappearance of all target lesions. Any |
| Complete | pathological lymph nodes (whether target |
| Response (irCR) | or non-target) must have reduction in short |
| (irRECIST) | axis to < 10 mm. |
| Immune-related | At least a 30% decrease in the sum of |
| Partial Response | diameters of target lesions and all new |
| (irPR) | measurable lesions (ie Percentage Change |
| (irRECIST) | in Tumor Burden), taking as reference the |
| | baseline sum diameters. Note: the |
| | appearance of new measurable lesions is |
| | factored into the overall Tumor Burden, but |
| | does not automatically qualify as |
| | progressive disease until the sum of the |
| | diameters increases by ≥ 20% when |
| | compared to nadir. |
| Immune-related | At least a 20% increase in Tumor Burden |
| Progressive | (ie the sum of diameters of target lesions, |
| Disease | and any new measurable lesions) taking as |
| (irPD) | reference the smallest sum on study (this |
| (irRECIST) | includes the baseline sum if that is the |
| | smallest on study). In addition to the |
| | relative increase of 20%, the sum must also |
| | demonstrate an absolute increase of at least |
| | 5 mm. Tumor assessments using immune- |
| | related criteria for progressive disease |
| | incorporates the contribution of new |
| | measurable lesions. Each net percentage |
| | change in tumor burden per assessment |
| | accounts for the size and growth kinetics of |
| | both old and new lesions as they appear. |
| Immune-related | Neither sufficient shrinkage to qualify for |
| Stable Disease | irPR nor sufficient increase to qualify for |
| (irSD) | irPD, taking as reference the smallest sum |
| (irRECIST) | diameters while on study. |

[0654] With respect to non-target lesions, responses to therapy may include:

| | |
|---|---|
| Complete | Disappearance of all non-target lesions. |
| Response (CR) | All lymph nodes must be non-pathological |
| (RECIST V1.1) | in size (<10 mm short axis). |
| Non-CR/Non-PD | Persistence of one or more non-target |
| (RECIST V1.1) | lesion(s). |
| Progressive | Unequivocal progression of existing non- |
| Disease (PD) | target lesions. The appearance of one or |
| (RECIST V1.1) | more new lesions is also considered |
| | progression. |
| Immune-related | Disappearance of all non-target lesions. All |
| Complete Response | lymph nodes must be non-pathological in |
| (irCR) (irRECIST) | size (<10 mm short axis). |
| Immune-related | Increases in number or size of non-target |
| Progressive | lesion(s) does not constitute progressive |
| Disease | disease unless/until Tumor Burden |
| (irPD) | increases by 20% (ie the sum of the |
| (irRECIST) | diameters at nadir of target lesions and any |
| | new measurable lesions increases by the |
| | required amount). Non-target lesions are |
| | not considered in the definition of Stable |
| | Disease and Partial Response. |

[0655] Patients treated according to the methods disclosed herein preferably experience improvement in at least one sign of cancer. In certain embodiments, improvement is measured by a reduction in the quantity and/or size of measurable tumor lesions. In certain embodiments, lesions can be measured on chest x-rays or CT or MRI films. In certain embodiments, cytology or histology can be used to evaluate responsiveness to a therapy.

[0656] In certain embodiments, the patient treated exhibits a complete response (CR), a partial response (PR), stable disease (SD), immune-related complete disease (irCR), immune-related partial response (irPR), or immune-related stable disease (irSD). In certain embodiments, the patient treated experiences tumor shrinkage and/or decrease in growth rate, i.e., suppression of tumor growth. In certain embodiments, unwanted cell proliferation is reduced or inhibited. In certain embodiments, one or more of the following can occur: the number of cancer cells can be reduced; tumor size can be reduced; cancer cell infiltration into peripheral organs can be inhibited, retarded, slowed, or stopped; tumor metastasis can be slowed or inhibited; tumor growth can be inhibited; recurrence of tumor can be prevented or delayed; one or more of the symptoms associated with cancer can be relieved to some extent.

[0657] In certain embodiments, administration of effective amounts of the anti-CD73 antibody and immuno-oncology agent (e.g., anti-PD-1 antibody) according to any of the methods provided herein produces at least one therapeutic effect selected from the group consisting of reduction in size of a tumor, reduction in number of metastatic lesions appearing over time, complete remission, partial remission, or stable disease. In certain embodiments, the methods of treatment produce a comparable clinical benefit rate (CBR=CR+PR+SD≥6 months) better than that achieved by an anti-CD73 antibody or immuno-oncology agent alone. In certain embodiments, the improvement of clinical benefit rate is about 20% 20%, 30%, 40%, 50%, 60%, 70%, 80% or more compared to an anti-CD73 antibody or immuno-oncology agent alone.

[0658] In certain embodiments, disease assessment before, during, and/or after treatment is performed by computed tomography and/or magnetic resonance imaging. In certain embodiments, disease assessment is performed at baseline and every 7-10 weeks from the start of treatment for until treatment discontinuation or completion.

[0659] In certain embodiments, anti-tumor efficacy is measured by ORR, DOR, and PF SR. ORR is defined herein as the proportion of all treated patients whose best overall response (BOR) is either a CR or PR. BOR is defined herein as the best response designation over the study as a whole, recorded between the dates of first dose until the last tumor assessment prior to subsequent therapy. DOR is defined herein as the time between the date of first response and the date of disease progression or death, whichever occurs first. PFSR is defined herein as the proportion of treated subjects remaining progression free and surviving. For example, PFSR at 24 weeks refers to the proportion of treated subjects remaining progression free and surviving at 24 weeks.

[0660] In certain embodiments, disease assessment before, during, and/or after treatment is performed on a biopsy sample obtained from the patient. The biopsy sample can be, e.g., a core-needle, excisional, or incisional biopsy.

[0661] In certain embodiments, the patient to be treated has at least one lesion with measurable disease as defined by RECIST v1.1.

[0662] In certain embodiments, the patient to be treated has progressive disease, as defined by RECIST v1.1.

[0663] In certain embodiments, the patient to be treated has a malignancy that is advanced (e.g., metastatic and/or unresectable) with measurable disease, as defined by RECIST v1.1.

[0664] In certain embodiments, the patient to be treated has received, and then progressed or been intolerant to, at least 1 standard treatment regimen in the advanced or metastatic setting.

[0665] In certain embodiments, the patient to be treated has been previously treated with an agent specifically targeting checkpoint pathway inhibition (e.g., anti-PD-1, anti-PD-L1, anti-PD-L2, anti-LAG-3, and anti-CTLA-4 antibody).

[0666] In certain embodiments, the patient to be treated has been previously treated with an agent specifically targeting T-cell co-stimulation pathways (e.g., anti-glucocorticoid induced tumor necrosis factor receptor, anti-CD137, and anti-OX40 antibody).

[0667] In certain embodiments, the patient to be treated has undergone prior palliative radiotherapy. In certain embodiments, the patient to be treated has adequate organ function, as summarized by the following: white blood cell count 2000/μL, neutrophils 1500/μL, platelets 100×10³/μL, hemoglobin≥9 g/dL, alanine aminotransferase (ALT) and aspartate aminotransferase (AST)≤3× the upper limit of normal (ULN), total bilirubin≤1.5×ULN, albumin>2 g/dL (20 g/L), International normalized ratio<1.5×ULN, activated partial thromboplastin time<1.5×ULN, clinically normal thyroid function or have controlled hypothyroidism on appropriate thyroid supplementation, and serum creatinine 1.5×ULN or creatinine clearance (CrCl) 40 mL/min.

[0668] In certain embodiments, the patient to be treated does not have known or suspected CNS metastases, untreated CNS metastases, or with the CNS as the only site of disease. However, in certain embodiments, patients with controlled brain metastases, defined as no radiographic progression for at least 4 weeks following radiation and/or surgical treatment (or 4 weeks of observation if no intervention is clinically indicated), off of steroids for at least 2 weeks, and no new or progressive neurological signs and symptoms, are amenable to treatment with the methods disclosed herein.

[0669] In certain embodiments, the patient to be treated does not have carcinomatous meningitis.

[0670] In certain embodiments, the patient to be treated does not have clinically relevant ascites (i.e., ascities requiring paracentesis) or moderate radiographic ascites.

[0671] In certain embodiments, the patient to be treated has not been previously treated with nivolumab.

[0672] In certain embodiments, the patient to be treated does not have a prior malignancy.

[0673] In certain embodiments, the patient to be treated does not have a different active malignancy requiring concurrent intervention.

[0674] In certain embodiments, the patient to be treated does not have a prior organ allograft.

[0675] In certain embodiments, the patient to be treated has not been previously treated with an anti-CD73 antibody, an anti-CD39 antibody, or an adenosine 2A receptor inhibitor.

[0676] In certain embodiments, the patient to be treated does not have a prior history of cerebrovascular accident, deep vein thrombosis, or other arterial thrombus.

[0677] In certain embodiments, the patient to be treated does not have active, known, or suspected autoimmune disease. However, in certain embodiments, patients with vitiligo, Type 1 diabetes mellitus, residual hypothyroidism due to autoimmune condition only requiring hormone replacement, patients with euthyroid with a history of Grave's disease, psoriasis not requiring systemic treatment, or conditions not expected to recur in the absence of an external trigger are amenable to treatment with the methods disclosed herein.

[0678] In certain embodiments, the patient to be treated does not have interstitial lung disease that is symptomatic or may interfere with the detection or management of suspected drug-related pulmonary toxicity.

[0679] In certain embodiments, the patient to be treated does not have chronic obstructive pulmonary disease requiring recurrent steroids bursts or chronic steroids at doses greater than 10 mg/day of prednisone or the equivalent.

[0680] In certain embodiments, the patient to be treated does not have a condition that requires systemic treatment with either corticosteroids (>10 mg daily prednisone equivalents) or other immunosuppressive medications within 14 days of study drug administration, except for adrenal replacement steroid doses>10 mg daily prednisone equivalent in the absence of active autoimmune disease.

[0681] In certain embodiments, the patient to be treated does not have uncontrolled or significant cardiovascular disease including, e.g., myocardial infarction or stroke/transient ischemic attack within 6 months of the initiation of treatment, uncontrolled angina within 3 months of the initiation of treatment, a history of clinically significant arrhythmias (e.g., ventricular tachycardia, ventricular fibrillation, or torsades de pointes), QT interval corrected for heart rate using Fridericia's formula (QTcF) prolongation>480 msec, history of other clinically significant heart disease (e.g., cardiomyopathy, congestive heart failure with New York Heart Association [NYHA] functional Classification III to IV, pericarditis, significant pericardial effusion), a requirement for daily supplemental oxygen therapy,

[0682] In certain embodiments, the patient to be treated does not have active hepatitis.

[0683] In certain embodiments, the patient to be treated does not have active bacterial, viral, or fungal infections≤7 days prior to initiation of treatment.

[0684] In certain embodiments, the patient to be treated does not have a history of testing positive for human immunodeficiency virus (HIV) or known acquired immunodeficiency syndrome (AIDS).

[0685] In certain embodiments, the patient to be treated does not have evidence or history of active or latent tuberculosis infection.

[0686] In certain embodiments, the patient to be treated has not undergone major surgery within 4 weeks of treatment.

[0687] In certain embodiments, all toxicities attributed to prior anti-cancer therapy other than alopecia and fatigue in the patient is resolved to Grade 1 (National Cancer Institute [NCI] Common Terminology Criteria for Adverse Events [CTCAE] Version 4.03) or baseline prior to initiation of treatment. However, in certain embodiments, those with toxicities attributed to prior anti-cancer therapy that are not expected to resolve and result in long-lasting sequelae, such as chronic neuropathy after platinum based therapy, are amenable to treatment with the methods disclosed herein.

[0688] In certain embodiments, the patient to be treated has not used non-oncology vaccines containing live virus for prevention of infectious diseases within 12 weeks of treatment.

[0689] In certain embodiments, the patient to be treated has not used packed red blood cells or received a platelet transfusion within 2 weeks prior to treatment.

[0690] In certain embodiments, the patient to be treated does not have a history of allergy to nivolumab.

[0691] In certain embodiments, the patient to be treated does not have a history of drug allergy (such as anaphylaxis) to prior anti-cancer immune modulating therapies (e.g., checkpoint inhibitors, T-cell co-stimulatory antibodies).

### Combination Therapies

[0692] Antibodies to CD73, e.g., the anti-CD73 antibodies described herein, e.g., in combination with an immuno-oncology agent (e.g., an anti-PD-1 antibody), can be combined with an immunogenic agent, such as cancerous cells, purified tumor antigens (including recombinant proteins, peptides, and carbohydrate molecules), cells, and cells transfected with genes encoding immune stimulating cytokines (He et al (2004) J. Immunol. 173:4919-28). Non-limiting examples of tumor vaccines that can be used include peptides of melanoma antigens, such as peptides of gp100, MAGE antigens, Trp-2, MART1 and/or tyrosinase, or tumor cells transfected to express the cytokine GM-CSF (discussed further below).

[0693] In humans, some tumors have been shown to be immunogenic such as melanomas. By lowering the threshold of T cell activation via CD73 inhibition, the tumor responses in the host can be activated, allowing treatment of non-immunogenic tumors or those having limited immunogenicity.

[0694] An anti-CD73 antibody, e.g., an anti-CD73 antibody described herein, and optionally an immuno-oncology agent, may be combined with a vaccination protocol. Many experimental strategies for vaccination against tumors have been devised (see Rosenberg, S., 2000, Development of Cancer Vaccines, ASCO Educational Book Spring: 60-62; Logothetis, C., 2000, ASCO Educational Book Spring: 300-302; Khayat, D. 2000, ASCO Educational Book Spring: 414-428; Foon, K. 2000, ASCO Educational Book Spring: 730-738; see also Restifo, N. and Sznol, M., Cancer Vaccines, Ch. 61, pp. 3023-3043 in DeVita et al. (eds.), 1997, Cancer: Principles and Practice of Oncology, Fifth Edition). In one of these strategies, a vaccine is prepared using autologous or allogeneic tumor cells. These cellular vaccines have been shown to be most effective when the tumor cells are transduced to express GM-CSF. GM-CSF has been shown to be a potent activator of antigen presentation for tumor vaccination (Dranoff et al. (1993) Proc. Natl. Acad. Sci U.S.A. 90: 3539-43).

[0695] The study of gene expression and large scale gene expression patterns in various tumors has led to the definition of so called tumor specific antigens (Rosenberg, S A (1999) Immunity 10: 281-7). In many cases, these tumor specific antigens are differentiation antigens expressed in the tumors and in the cell from which the tumor arose, for example melanocyte antigens gp100, MAGE antigens, and Trp-2. More importantly, many of these antigens can be shown to be the targets of tumor specific T cells found in the host. CD73 inhibition can be used in conjunction with a collection of recombinant proteins and/or peptides expressed in a tumor in order to generate an immune response to these proteins. These proteins are normally viewed by the immune system as self antigens and are therefore tolerant to them. The tumor antigen can include the protein telomerase, which is required for the synthesis of telomeres of chromosomes and which is expressed in more than 85% of human cancers and in only a limited number of somatic tissues (Kim et al. (1994) Science 266: 2011-2013). Tumor antigen can also be “neo-antigens” expressed in cancer cells because of somatic mutations that alter protein sequence or create fusion proteins between two unrelated sequences (i.e., bcr-abl in the Philadelphia chromosome), or idiotype from B cell tumors.

[0696] Other tumor vaccines can include the proteins from viruses implicated in human cancers such a Human Papilloma Viruses (HPV), Hepatitis Viruses (HBV and HCV) and Kaposi's Herpes Sarcoma Virus (KHSV). Another form of tumor specific antigen which can be used in conjunction with CD73 inhibition is purified heat shock proteins (HSP) isolated from the tumor tissue itself. These heat shock proteins contain fragments of proteins from the tumor cells and these HSPs are highly efficient at delivery to antigen presenting cells for eliciting tumor immunity (Suot & Srivastava (1995) Science 269:1585-1588; Tamura et al. (1997) Science 278:117-120).

[0697] Dendritic cells (DC) are potent antigen presenting cells that can be used to prime antigen-specific responses. DC's can be produced ex vivo and loaded with various protein and peptide antigens as well as tumor cell extracts (Nestle et al. (1998) Nature Medicine 4: 328-332). DCs can also be transduced by genetic means to express these tumor antigens as well. DCs have also been fused directly to tumor cells for the purposes of immunization (Kugler et al. (2000) Nature Medicine 6:332-336). As a method of vaccination, DC immunization can be effectively combined with CD73 inhibition to activate more potent anti-tumor responses.

[0698] CD73 inhibition, optionally with an immuno-oncology agent (e.g., an anti-PD-1 antibody) can be combined with standard cancer treatments (e.g., surgery, radiation, and chemotherapy). CD73 inhibition can be effectively combined with chemotherapeutic regimes. In these instances, it may be possible to reduce the dose of chemotherapeutic reagent administered (Mokyr et al. (1998) Cancer Research 58: 5301-5304). An example of such a combination is an anti-CD73 antibody in combination with decarbazine for the treatment of melanoma. Another example of such a combination is an anti-CD73 antibody in combination with interleukin-2 (IL-2) for the treatment of melanoma. The scientific rationale behind the combined use of CD73 inhibition and chemotherapy is that cell death, that is a consequence of the cytotoxic action of most chemotherapeutic compounds, should result in increased levels of tumor antigen in the antigen presentation pathway. Other combination therapies that may result in synergy with CD73 inhibition through cell death are radiation, surgery, and hormone deprivation. Each of these protocols creates a source of tumor antigen in the host. Angiogenesis inhibitors can also be combined with CD73 inhibition. Inhibition of angiogenesis leads to tumor cell death which may feed tumor antigen into host antigen presentation pathways.

[0699] Yet another example of such a combination is an anti-CD73 antibody and optionally an immuno-oncology agent (e.g., an anti-PD-1 antibody) in combination with an anti-CD39, anti-A2AR or chemical inhibitor (e.g., SCH58261), or antiA2BR antibody or chemical inhibitor. The scientific rationale behind the combined use of CD73 inhibition and inhibition of CD39, A2AR, or A2BR is that these proteins are also linked to CD73 biological function and signaling. Specifically, CD39 catalyzes the conversion of ATP or ADP to AMP, thus providing the substrate (AMP) for CD73 enzymatic activity (i.e. the conversion of AMP to adenosine). Furthermore, adenosine is a ligand for four known receptors, including MR, A2AR, A2BR, and A3. A2AR and A2BR have been shown to regulate tumor cell proliferation, growth, migration, and metastasis, as well as T-cell activation in the tumor environment through cAMP signaling.

[0700] The anti-CD73 antibody optionally with an immuno-oncology agent (e.g., an anti-PD-1 antibody) can also be used in combination with bispecific antibodies that target Fcα or Fcγ receptor-expressing effectors cells to tumor cells (see, e.g., U.S. Pat. Nos. 5,922,845 and 5,837,243). Bispecific antibodies can be used to target two separate antigens. For example anti-Fc receptor/anti tumor antigen (e.g., Her-2/neu) bispecific antibodies have been used to target macrophages to sites of tumor. This targeting may more effectively activate tumor specific responses. Alternatively, antigen may be delivered directly to DCs by the use of bispecific antibodies which bind to tumor antigen and a dendritic cell specific cell surface marker.

[0701] Tumors evade host immune surveillance by a large variety of mechanisms. Many of these mechanisms may be overcome by the inactivation of proteins which are expressed by the tumors and which are immunosuppressive. These include among others TGF-β (Kehrl et al. (1986) J. Exp. Med. 163: 1037-1050), IL-10 (Howard & O'Garra (1992) Immunology Today 13: 198-200), and Fas ligand (Hahne et al. (1996) Science 274: 1363-1365). Antibodies to each of these entities can be used in combination with anti-CD73 antibodies to counteract the effects of the immunosuppressive agent and favor tumor immune responses by the host.

[0702] Other antibodies which activate host immune responsiveness can be used in combination with anti-CD73 antibodies. These include molecules on the surface of dendritic cells which activate DC function and antigen presentation. Anti-CD40 antibodies are able to substitute effectively for T cell helper activity (Ridge et al. (1998) Nature 393: 474-478) and can be used in conjunction with anti-CD73 antibodies. Activating antibodies to T cell costimulatory molecules such as OX-40 (Weinberg et al. (2000) Immunol 164: 2160-2169), 4-1BB (Melero et al. (1997) Nature Medicine 3: 682-685 (1997), and ICOS (Hutloff et al. (1999) Nature 397: 262-266) may also provide for increased levels of T cell activation. Inhibitors of PD1, PD-L1 or CTLA-4 (e.g., U.S. Pat. No. 5,811,097), may also be used in conjunction with an anti-CD73 antibody.

[0703] Other methods described herein are used to treat patients that have been exposed to particular toxins or pathogens. Accordingly, another aspect described herein provides a method of treating an infectious disease in a subject comprising administering to the subject an anti-CD73 antibody, or antigen-binding portion thereof, such that the subject is treated for the infectious disease. Additionally or alternatively, the antibody can be a chimeric or humanized antibody.

[0704] In all of the above methods, the anti-CD73 antibody and optionally immuno-oncology agent can be combined with other forms of immunotherapy such as cytokine treatment (e.g., interferons, GM-CSF, G-CSF, IL-2), or bispecific antibody therapy, which provides for enhanced presentation of tumor antigens (see, e.g., Holliger (1993) Proc. Natl. Acad. Sci. USA 90:6444-6448; Poljak (1994) Structure 2:1121-1123).

[0705] In addition to the combinations therapies described above, the anti-CD73 antibodies described herein and optionally immuno-oncology agent can also be used in combination therapy, e.g., for treating cancer, as described below.

[0706] Further provided herein are methods of combination therapy in which an anti-CD73 antibody is coadministered with one or more additional agents, e.g., antibodies, that are effective in stimulating immune responses to thereby further enhance, stimulate or upregulate immune responses in a subject.

[0707] Generally, an anti-CD73 antibody described herein can be combined with (i) an agonist of a co-stimulatory receptor and/or (ii) an antagonist of an inhibitory signal on T cells, both of which result in amplifying antigen-specific T cell responses (immune checkpoint regulators). Most of the co-stimulatory and co-inhibitory molecules are members of the immunoglobulin super family (IgSF), and anti-CD73 antibodies described herein may be administered with an agent that targets a member of the IgSF family to increase an immune response. One important family of membrane-bound ligands that bind to co-stimulatory or co-inhibitory receptors is the B7 family, which includes B7-1, B7-2, B7-H1 (PD-L1), B7-DC (PD-L2), B7-H2 (ICOS-L), B7-H3, B7-H4, B7-H5 (VISTA), and B7-H6. Another family of membrane bound ligands that bind to co-stimulatory or co-inhibitory receptors is the TNF family of molecules that bind to cognate TNF receptor family members, which include CD40 and CD40L, OX-40, OX-40L, CD70, CD27L, CD30, CD30L, 4-1BBL, CD137, GITR, TRAIL/Apo2-L, TRAILR1/DR4, TRAILR2/DR5, TRAILR3, TRAILR4, OPG, RANK, RANKL, TWEAKR/Fn14, TWEAK, BAFFR, EDAR, XEDAR, TACI, APRIL, BCMA, LTβR, LIGHT, DcR3, HVEM, VEGI/TL1A, TRAMP/DR3, EDAR, EDA1, XEDAR, EDA2, TNFR1, Lymphotoxin α/TNFβ, TNFR2, TNFα, LTβR, Lymphotoxin a 1(32, FAS, FASL, RELT, DR6, TROY, NGFR (see, e.g., Tansey (2009) Drug Discovery Today 00:1). T cell activation is also regulated by soluble cytokines. Thus, anti-CD73 antibodies can be used in combination with (i) antagonists (or inhibitors or blocking agents) of proteins of the IgSF family or B7 family or the TNF family that inhibit T cell activation or antagonists of cytokines that inhibit T cell activation (e.g., IL-6, IL-10, TGF-β, VEGF; “immunosuppressive cytokines”) and/or (ii) agonists of stimulatory receptors of the IgSF family, B7 family or the TNF family or of cytokines that stimulate T cell activation, for stimulating an immune response, e.g., for treating proliferative diseases, such as cancer.

[0708] For example, T cell responses can be stimulated by a combination of anti-CD73 antibodies described herein, e.g., CD73.4-IgG2CS-IgG1.1f, and one or more of the following agents:
[0709] (1) An antagonist (inhibitor or blocking agent) of a protein that inhibits T cell activation (e.g., immune checkpoint inhibitors), such as CTLA-4, PD-1, PD-L1, PD-L2, and LAG-3, as described above, and any of the following proteins: TIM-3, Galectin 9, CEACAM-1, BTLA, CD69, Galectin-1, TIGIT, CD113, GPR56, VISTA, 2B4, CD48, GARP, CD73, PD1H, LAIR1, TIM-1,TIM-4, CD39.
[0710] (2) An agonist of a protein that stimulates T cell activation, such as B7-1, B7-2, CD28, 4-IBB (CD137), 4-1BBL, GITR, GITRL, ICOS, ICOS-L, OX40, OX40L, CD70, CD27, CD40, DR3 and CD28H.

[0711] Exemplary agents that modulate one of the above proteins and may be combined with antagonist anti-CD73 antibodies, e.g., those described herein, for treating cancer, include: Yervoy™ (ipilimumab) or Tremelimumab (to CTLA-4), galiximab (to B7.1), BMS-936558 (to PD-1), CT-011 (to PD-1), MK-3475 (to PD-1), AMP224 (to B7DC), BMS-936559 (to B7-H1), MPDL3280A (to B7-H1), MEDI-570 (to ICOS), AMG557 (to B7H2), MGA271 (to B7H3), IMP321 (to LAG-3), BMS-663513 (to CD137), PF-05082566 (to CD137), CDX-1127 (to CD27), anti-OX40 (Providence Health Services), huMAbOX40L (to OX40L), Atacicept (to TALI), CP-870893 (to CD40), Lucatumumab (to CD40), Dacetuzumab (to CD40), Muromonab-CD3 (to CD3), Ipilumumab (to CTLA-4).

[0712] Other molecules that can be combined with antagonist anti-CD73 antibodies for the treatment of cancer include antagonists of inhibitory receptors on NK cells or agonists of activating receptors on NK cells. For example, anti-CD73 antagonist antibodies can be combined with antagonists of KIR (e.g., lirilumab).

[0713] T cell activation is also regulated by soluble cytokines, and anti-CD73 antibodies may be administered to a subject, e.g., having cancer, with antagonists of cytokines that inhibit T cell activation or agonists of cytokines that stimulate T cell activation.

[0714] In certain embodiments, anti-CD73 antibodies can be used in combination with (i) antagonists (or inhibitors or blocking agents) of proteins of the IgSF family or B7 family or the TNF family that inhibit T cell activation or antagonists of cytokines that inhibit T cell activation (e.g., IL-6, IL-10, TGF-β, VEGF; “immunosuppressive cytokines”) and/or (ii) agonists of stimulatory receptors of the IgSF family, B7 family or the TNF family or of cytokines that stimulate T cell activation, for stimulating an immune response, e.g., for treating proliferative diseases, such as cancer.

[0715] Yet other agents for combination therapies include agents that inhibit or deplete macrophages or monocytes, including but not limited to CSF-1R antagonists such as CSF-1R antagonist antibodies including RG7155 (WO11/70024, WO11/107553, WO11/131407, WO13/87699, WO13/119716, WO13/132044) or FPA-008 (WO11/140249; WO13169264; WO14/036357).

[0716] Anti-CD73 antibodies may also be administered with agents that inhibit TGF-β signaling.

[0717] Additional agents that may be combined with an anti-CD73 antibody include agents that enhance tumor antigen presentation, e.g., dendritic cell vaccines, GM-CSF secreting cellular vaccines, CpG oligonucleotides, and imiquimod, or therapies that enhance the immunogenicity of tumor cells (e.g., anthracyclines).

[0718] Yet other therapies that may be combined with an anti-CD73 antibody include therapies that deplete or block Treg cells, e.g., an agent that specifically binds to CD25.

[0719] Another therapy that may be combined with an anti-CD73 antibody is a therapy that inhibits a metabolic enzyme such as indoleamine dioxigenase (IDO), dioxigenase, arginase, or nitric oxide synthetase.

[0720] Another class of agents that may be used with an anti-CD73 antibody includes agents that inhibit the formation of adenosine or inhibit the adenosine A2A receptor.

[0721] Other therapies that may be combined with an anti-CD73 antibody for treating cancer include therapies that reverse/prevent T cell anergy or exhaustion and therapies that trigger an innate immune activation and/or inflammation at a tumor site.

[0722] An anti-CD73 antibody may be combined with more than one immuno-oncology agent, and may be, e.g., combined with a combinatorial approach that targets multiple elements of the immune pathway, such as one or more of the following: a therapy that enhances tumor antigen presentation (e.g., dendritic cell vaccine, GM-CSF secreting cellular vaccines, CpG oligonucleotides, imiquimod); a therapy that inhibits negative immune regulation e.g., by inhibiting CTLA-4 and/or PD1/PD-L1/PD-L2 pathway and/or depleting or blocking Tregs or other immune suppressing cells; a therapy that stimulates positive immune regulation, e.g., with agonists that stimulate the CD-137, OX-40, and/or GITR pathway and/or stimulate T cell effector function; a therapy that increases systemically the frequency of anti-tumor T cells; a therapy that depletes or inhibits Tregs, such as Tregs in the tumor, e.g., using an antagonist of CD25 (e.g., daclizumab) or by ex vivo anti-CD25 bead depletion; a therapy that impacts the function of suppressor myeloid cells in the tumor; a therapy that enhances immunogenicity of tumor cells (e.g., anthracyclines); adoptive T cell or NK cell transfer including genetically modified cells, e.g., cells modified by chimeric antigen receptors (CAR-T therapy); a therapy that inhibits a metabolic enzyme such as indoleamine dioxigenase (IDO), dioxigenase, arginase, or nitric oxide synthetase; a therapy that reverses/prevents T cell anergy or exhaustion; a therapy that triggers an innate immune activation and/or inflammation at a tumor site; administration of immune stimulatory cytokines; or blocking of immunorepressive cytokines.

[0723] Generally, anti-CD73 antibodies described herein can be used together with one or more of agonistic agents that ligate positive costimulatory receptors, blocking agents that attenuate signaling through inhibitory receptors, antagonists, and one or more agents that increase systemically the frequency of anti-tumor T cells, agents that overcome distinct immune suppressive pathways within the tumor microenvironment (e.g., block inhibitory receptor engagement (e.g., PD-L1/PD-1 interactions), deplete or inhibit Tregs (e.g., using an anti-CD25 monoclonal antibody (e.g., daclizumab) or by ex vivo anti-CD25 bead depletion), inhibit metabolic enzymes such as IDO, or reverse/prevent T cell anergy or exhaustion) and agents that trigger innate immune activation and/or inflammation at tumor sites. An increased internalization of inhibitory receptors may translate into a lower level of a potential inhibitor (assuming that signaling does not ensue).

[0724] In certain embodiments, an anti-CD73 antibody is administered to a subject together with a BRAF inhibitor if the subject is BRAF V600 mutation positive.

[0725] Provided herein are methods for stimulating an immune response in a subject comprising administering to the subject an antagonist anti-CD73 molecule, e.g., an antibody, and one or more additional immunostimulatory antibodies, such as an anti-PD-1 antagonist, e.g., antagonist antibody, an anti-PD-L1 antagonist, e.g., antagonist antibody, an antagonist anti-CTLA-4 antagonist, e.g., antagonist antibody and/or an anti-LAG3 antagonist, e.g., an antagonist antibody, such that an immune response is stimulated in the subject, for example to inhibit tumor growth or to stimulate an anti-viral response. In one embodiment, the subject is administered an antagonist anti-CD73 antibody and an antagonist anti-PD-1 antibody. In one embodiment, the subject is administered an antagonist anti-CD73 antibody and an antagonist anti-PD-L1 antibody. In one embodiment, the subject is administered an antagonist anti-CD73 antibody and an antagonist anti-CTLA-4 antibody. In one embodiment, the anti-CD73 antibody is a human antibody, such as an antibody described herein. Alternatively, the anti-CD73 antibody can be, for example, a chimeric or humanized antibody (e.g., prepared from a mouse anti-CD73 mAb), such as those further described herein. In one embodiment, the at least one additional immunostimulatory antibody (e.g., an antagonist anti-PD-1, an antagonist anti-PD-L1, an antagonist anti-CTLA-4 and/or an antagonist anti-LAG3 antibody) is a human antibody. Alternatively, the at least one additional immunostimulatory antibody can be, for example, a chimeric or humanized antibody (e.g., prepared from a mouse anti-PD-1, anti-PD-L1, anti-CTLA-4 and/or anti-LAG3 antibody).

[0726] Provided herein are methods for treating a hyperproliferative disease (e.g., cancer), comprising administering an antagonist anti-CD73 antibody and an antagonist PD-1 antibody to a subject. In certain embodiments, the anti-CD73 antibody is administered at a subtherapeutic dose, the anti-PD-1 antibody is administered at a subtherapeutic dose, or both are administered at a subtherapeutic dose. Also provided herein are methods for altering an adverse event associated with treatment of a hyperproliferative disease with an immunostimulatory agent, comprising administering an anti-CD73 antibody and a subtherapeutic dose of anti-PD-1 antibody to a subject. In certain embodiments, the subject is human. In certain embodiments, the anti-PD-1 antibody is a human sequence monoclonal antibody and the anti-CD73 antibody is human sequence monoclonal antibody, such as an antibody comprising the CDRs or variable regions of 11F11, 4C3, 4D4, 10D2, 11A6, 24H2, 5F8, 6E11, 7A11, CD73.3, CD73.4, CD73.5, CD73.6, CD73.7, CD73.8, CD73.9, CD73.10 or CD73.11 described herein or another antagonist anti-CD73 antibody described herein.

[0727] Suitable PD-1 antagonists for use in the methods described herein, include, without limitation, ligands, antibodies (e.g., monoclonal antibodies and bispecific antibodies), and multivalent agents. In one embodiment, the PD-1 antagonist is a fusion protein, e.g., an Fc fusion protein, such as AMP-244. In one embodiment, the PD-1 antagonist is an anti-PD-1 or anti-PD-L1 antibody.

[0728] An exemplary anti-PD-1 antibody is nivolumab (BMS-936558) or an antibody that comprises the CDRs or variable regions of one of antibodies 17D8, 2D3, 4H1, 5C4, 7D3, 5F4 and 4A11 described in WO 2006/121168. In certain embodiments, an anti-PD1 antibody is MK-3475 (Lambrolizumab) described in WO2012/145493; AMP-514 described in WO 2012/145493; PDR001; and CT-011 (Pidilizumab; previously CT-AcTibody or BAT; see, e.g., Rosenblatt et al. (2011) J. Immunotherapy 34:409). Further known PD-1 antibodies and other PD-1 inhibitors include those described in WO 2009/014708, WO 03/099196, WO 2009/114335, WO 2011/066389, WO 2011/161699, WO 2012/145493, U.S. Pat. Nos. 7,635,757 and 8,217,149, and U.S. Patent Publication No. 2009/0317368. Any of the anti-PD-1 antibodies disclosed in WO2013/173223 may also be used. An anti-PD-1 antibody that competes for binding with, and/or binds to the same epitope on PD-1 as, as one of these antibodies may also be used in combination treatments. In certain embodiments, the antibody has at least about 90% variable region amino acid sequence identity with the above-mentioned antibodies.

[0729] In certain embodiments, the anti-CD73 antibody is used in combination with nivolumab, which comprises heavy and light chain s comprising the sequences shown in SEQ ID NOs: 449 and 450, respectively, or antigen binding fragments and variants thereof. In certain embodiments, the antibody has heavy and light chain CDRs or variable regions of nivolumab. Accordingly, in one embodiment, the antibody comprises CDR1, CDR2, and CDR3 domains of the VH of nivolumab having the sequence set forth in SEQ ID NO: 381, and CDR1, CDR2 and CDR3 domains of the VL of nivolumab having the sequence set forth in SEQ ID NO: 382. In certain embodiments, the antibody comprises CDR1, CDR2 and CDR3 domains comprising the sequences set forth in SEQ ID NOs: 383-385, respectively, and CDR1, CDR2 and CDR3 domains comprising the sequences set forth in SEQ ID NOs: 386-388, respectively. In certain embodiments, the antibody comprises VH and/or VL regions comprising the amino acid sequences set forth in SEQ ID NO: 381 and/or SEQ ID NO: 382, respectively. In certain embodiments, the antibody comprises heavy chain variable (VH) and/or light chain variable (VL) regions encoded by the nucleic acid sequences set forth in SEQ ID NO: 389 and/or SEQ ID NO: 390, respectively. In certain embodiments, the antibody has at least about 90%, e.g., at least about 90%, 95%, or 99% variable region identity with SEQ ID NO: 381 or SEQ ID NO: 382.

[0730] In certain embodiments, e.g., of the combination therapies provided herein, the anti-CD73 antibody is MEDI9447 or Phen 0203hIgG1, described in WO2016/075099 or an anti-CD73 antibody described in WO2016/055609. For example, MEDI9447 may be combined with an anti-PD-L1 antibody, e.g., MEDI4736, according to the regimens provided herein. For example, they may be administered every 1, 2, 3, or 4 weeks, wherein they are both administered on the same day within minutes or hours of each other.

[0731] In certain embodiments, the anti-PD-1 antibody binds to human PD-1 with a K_{D} of 5×10⁻⁸M or less, binds to human PD-1 with a K_{D} of 1×10⁻⁸M or less, binds to human PD-1 with a K_{D} of 5×10⁻⁹M or less, or binds to human PD-1 with a K_{D} of between 1×10⁻⁸M and 1×10⁻¹° M or less.

[0732] Provided herein are methods for treating a hyperproliferative disease (e.g., cancer), comprising administering an antagonist anti-CD73 antibody and an antagonist PD-L1 antibody to a subject. In certain embodiments, the anti-CD73 antibody is administered at a subtherapeutic dose, the anti-PD-L1 antibody is administered at a subtherapeutic dose, or both are administered at a subtherapeutic dose. Provided herein are methods for altering an adverse event associated with treatment of a hyperproliferative disease with an immunostimulatory agent, comprising administering an anti-CD73 antibody and a subtherapeutic dose of anti-PD-L1 antibody to a subject. In certain embodiments, the subject is human. In certain embodiments, the anti-PD-L1 antibody is a human sequence monoclonal antibody and the anti-CD73 antibody is human sequence monoclonal antibody, such as an antibody comprising the CDRs or variable regions of 11F11, 4C3, 4D4, 10D2, 11A6, 24H2, 5F8, 6E11, 7A11, CD73.3, CD73.4, CD73.5, CD73.6, CD73.7, CD73.8, CD73.9, CD73.10 or CD73.11 described herein or another antagonist anti-CD73 antibody described herein.

[0733] In one embodiment, the anti-PD-L1 antibody is BMS-936559 (referred to as 12A4 in WO 2007/005874 and U.S. Pat. No. 7,943,743), or an antibody that comprises the CDRs or variable regions of 3G10, 12A4, 10A5, 5F8, 10H10, 1B12, 7H1, 11E6, 12B7 and 13G4, which are described in PCT Publication WO 07/005874 and U.S. Pat. No. 7,943,743. In certain embodiment an anti-PD-L1 antibody is MEDI4736 (also known as Anti-B7-H1) or MPDL3280A (also known as RG7446). Any of the anti-PD-L1 antibodies disclosed in WO2013/173223, WO2011/066389, WO2012/145493, U.S. Pat. Nos. 7,635,757 and 8,217,149 and U.S. Publication No. 2009/145493 may also be used. Anti-PD-L1 antibodies that compete with and/or bind to the same epitope as that of any of these antibodies may also be used in combination treatments.

[0734] In certain embodiments, the anti-PD-L1 antibody binds to human PD-L1 with a K_{D} of 5×10⁻⁸M or less, binds to human PD-L1 with a K_{D} of 1×10⁻⁸M or less, binds to human PD-L1 with a K_{D} of 5×10⁻⁹M or less, or binds to human PD-L1 with a K_{D} of between 1×10⁻⁸M and 1×10⁻¹° M or less.

[0735] Provided herein are methods for treating a hyperproliferative disease (e.g., cancer), comprising administering an anti-CD73 antibody described herein and a CTLA-4 antagonist antibody to a subject. In certain embodiments, the anti-CD73 antibody is administered at a subtherapeutic dose, the anti-CTLA-4 antibody is administered at a subtherapeutic dose, or both are administered at a subtherapeutic dose. Provided herein are methods for altering an adverse event associated with treatment of a hyperproliferative disease with an immunostimulatory agent, comprising administering an anti-CD73 antibody and a subtherapeutic dose of anti-CTLA-4 antibody to a subject. In certain embodiments, the subject is human. In certain embodiments, the anti-CTLA-4 antibody is an antibody selected from the group of: Yervoy™ (ipilimumab or antibody 10D1, described in PCT Publication WO 01/14424), tremelimumab (formerly ticilimumab, CP-675,206), monoclonal or an anti-CTLA-4 antibody described in any of the following publications: WO 98/42752; WO 00/37504; U.S. Pat. No. 6,207,156; Hurwitz et al. (1998) Proc. Natl. Acad. Sci. USA 95(17):10067-10071; Camacho et al. (2004)J Clin. Oncology 22(145): Abstract No. 2505 (antibody CP-675206); and Mokyr et al. (1998) Cancer Res. 58:5301-5304. Any of the anti-CTLA-4 antibodies disclosed in WO2013/173223 may also be used.

[0736] In certain embodiments, the anti-CTLA-4 antibody binds to human CTLA-4 with a K_{D} of 5×10⁻⁸M or less, binds to human CTLA-4 with a K_{D} of 1×10⁻⁸M or less, binds to human CTLA-4 with a K_{D} of 5×10⁻⁹M or less, or binds to human CTLA-4 with a K_{D} of between 1×10⁻⁸M and 1×10⁻¹⁰ M or less.

[0737] Provided herein are methods for treating a hyperproliferative disease (e.g., cancer), comprising administering an anti-CD73 antibody and an anti-LAG-3 antibody to a subject. In further embodiments, the anti-CD73 antibody is administered at a subtherapeutic dose, the anti-LAG-3 antibody is administered at a subtherapeutic dose, or both are administered at a subtherapeutic dose. Provide herein are methods for altering an adverse event associated with treatment of a hyperproliferative disease with an immunostimulatory agent, comprising administering an anti-CD73 antibody and a subtherapeutic dose of anti-LAG-3 antibody to a subject. In certain embodiments, the subject is human. In certain embodiments, the anti-PD-L1 antibody is a human sequence monoclonal antibody and the anti-CD73 antibody is human sequence monoclonal antibody, such as an antibody comprising the CDRs or variable regions of 11F11, 4C3, 4D4, 10D2, 11A6, 24H2, 5F8, 6E11, 7A11, CD73.3, CD73.4, CD73.5, CD73.6, CD73.7, CD73.8, CD73.9, CD73.10 or CD73.11 or another antagonist anti-CD73 antibody described herein. Examples of anti-LAG3 antibodies include antibodies comprising the CDRs or variable regions of antibodies 25F7, 26H10, 25E3, 8B7, 11F2 or 17E5, which are described in U.S. Patent Publication No. US2011/0150892 and WO2014/008218. In one embodiment, an anti-LAG-3 antibody is BMS-986016. Other art recognized anti-LAG-3 antibodies that can be used include IMP731 described in US 2011/007023. IMP-321 may also be used. Anti-LAG-3 antibodies that compete with and/or bind to the same epitope as that of any of these antibodies may also be used in combination treatments.

[0738] In certain embodiments, the anti-LAG-3 antibody binds to human LAG-3 with a K_{D} of 5×10⁻⁸M or less, binds to human LAG-3 with a K_{D} of 1×10⁻⁸M or less, binds to human LAG-3 with a K_{D} of 5×10⁻⁹M or less, or binds to human LAG-3 with a K_{D} of between 1×10⁻⁸M and 1×10⁻¹° M or less.

[0739] In certain embodiments, the anti-CD73 antibody is administered together with an anti-GITR agonist antibody, e.g., an antibody having the CDR sequences of 6C8, e.g., a humanized antibody having the CDRs of 6C8, as described, e.g., in WO2006/105021; an antibody comprising the CDRs of an anti-GITR antibody described in WO2011/028683; an antibody comprising the CDRs of an anti-GITR antibody described in JP2008278814; or an antibody comprising the CDRs of an anti-GITR antibody described in PCT/US2015/033991.

[0740] Administration of anti-CD73 antibodies described herein and antagonists, e.g., antagonist antibodies, to one or more second target antigens such as LAG-3 and/or CTLA-4 and/or PD-1 and/or PD-L1 can enhance the immune response to cancerous cells in the patient. Cancers whose growth may be inhibited using the antibodies of the instant disclosure include cancers typically responsive to immunotherapy. Representative examples of cancers for treatment with the combination therapy of the instant disclosure include those cancers specifically listed above in the discussion of monotherapy with anti-CD73 antibodies.

[0741] In certain embodiments, the combination of therapeutic antibodies discussed herein can be administered concurrently as a single composition in a pharmaceutically acceptable carrier, or concurrently as separate compositions with each antibody in a pharmaceutically acceptable carrier. In another embodiment, the combination of therapeutic antibodies can be administered sequentially. For example, an anti-CTLA-4 antibody and an anti-CD73 antibody can be administered sequentially, such as anti-CTLA-4 antibody being administered first and anti-CD73 antibody second, or anti-CD73 antibody being administered first and anti-CTLA-4 antibody second. Additionally or alternatively, an anti-PD-1 antibody and an anti-CD73 antibody can be administered sequentially, such as anti-PD-1 antibody being administered first and anti-CD73 antibody second, or anti-CD73 antibody being administered first and anti-PD-1 antibody second. Additionally or alternatively, an anti-PD-L1 antibody and an anti-CD73 antibody can be administered sequentially, such as anti-PD-L1 antibody being administered first and anti-CD73 antibody second, or anti-CD73 antibody being administered first and anti-PD-L1 antibody second. Additionally or alternatively, an anti-LAG-3 antibody and an anti-CD73 antibody can be administered sequentially, such as anti-LAG-3 antibody being administered first and anti-CD73 antibody second, or anti-CD73 antibody being administered first and anti-LAG-3 antibody second.

[0742] Furthermore, if more than one dose of the combination therapy is administered sequentially, the order of the sequential administration can be reversed or kept in the same order at each time point of administration, sequential administrations can be combined with concurrent administrations, or any combination thereof. For example, the first administration of a combination anti-CTLA-4 antibody and anti-CD73 antibody can be concurrent, the second administration can be sequential with anti-CTLA-4 antibody first and anti-CD73 antibody second, and the third administration can be sequential with anti-CD73 antibody first and anti-CTLA-4 antibody second, etc. Additionally or alternatively, the first administration of a combination anti-PD-1 antibody and anti-CD73 antibody can be concurrent, the second administration can be sequential with anti-PD-1 antibody first and anti-CD73 antibody second, and the third administration can be sequential with anti-CD73 antibody first and anti-PD-1 antibody second, etc. Additionally or alternatively, the first administration of a combination anti-PD-L1 antibody and anti-CD73 antibody can be concurrent, the second administration can be sequential with anti-PD-L1 antibody first and anti-CD73 antibody second, and the third administration can be sequential with anti-CD73 antibody first and anti-PD-L1 antibody second, etc. Additionally or alternatively, the first administration of a combination anti-LAG-3 antibody and anti-CD73 antibody can be concurrent, the second administration can be sequential with anti-LAG-3 antibody first and anti-CD73 antibody second, and the third administration can be sequential with anti-CD73 antibody first and anti-LAG-3 antibody second, etc. Another representative dosing scheme can involve a first administration that is sequential with anti-CD73 first and anti-CTLA-4 antibody (and/or anti-PD-1 antibody and/or anti-PD-L1 antibody and/or anti-LAG-3 antibody) second, and subsequent administrations may be concurrent.

[0743] In one embodiment, a subject having a disease that may benefit from stimulation of the immune system, e.g., cancer or an infectious disease, is treated by administration to the subject of an immuno-oncology agent and an anti-CD73 antibody, wherein the immuno-oncology agent is a CD137 (4-IBB) agonist, such as an agonistic CD137 antibody. Suitable CD137 antibodies include, for example, urelumab or PF-05082566 (WO12/32433).

[0744] In one embodiment, a subject having a disease that may benefit from stimulation of the immune system, e.g., cancer or an infectious disease, is treated by administration to the subject of an immuno-oncology agent and an anti-CD73 antibody, wherein the immuno-oncology agent is an OX40 agonist, such as an agonistic OX40 antibody. Suitable OX40 antibodies include, for example, MEDI-6383, MEDI-6469 or MOXR0916 (RG7888; WO06/029879).

[0745] In one embodiment, a subject having a disease that may benefit from stimulation of the immune system, e.g., cancer or an infectious disease, is treated by administration to the subject of an immuno-oncology agent and an anti-CD73 antibody, wherein the immuno-oncology agent is a CD40 agonist, such as an agonistic CD40 antibody. In certain embodiments, the immuno-oncology agent is a CD40 antagonist, such as an antagonistic CD40 antibody. Suitable CD40 antibodies include, for example, lucatumumab (HCD122), dacetuzumab (SGN-40), CP-870,893 or Chi Lob 7/4.

[0746] In one embodiment, a subject having a disease that may benefit from stimulation of the immune system, e.g., cancer or an infectious disease, is treated by administration to the subject of an immuno-oncology agent and an anti-CD73 antibody, wherein the immuno-oncology agent is a CD27 agonist, such as an agonistic CD27 antibody. Suitable CD27 antibodies include, for example, varlilumab (CDX-1127).

[0747] In one embodiment, a subject having a disease that may benefit from stimulation of the immune system, e.g., cancer or an infectious disease, is treated by administration to the subject of an immuno-oncology agent and an anti-CD73 antibody, wherein the immuno-oncology agent is MGA271 (to B7H3) (WO11/109400).

[0748] In one embodiment, a subject having a disease that may benefit from stimulation of the immune system, e.g., cancer or an infectious disease, is treated by administration to the subject of an immuno-oncology agent and an anti-CD73 antibody, wherein the immuno-oncology agent is a KIR antagonist, such as lirilumab.

[0749] In one embodiment, a subject having a disease that may benefit from stimulation of the immune system, e.g., cancer or an infectious disease, is treated by administration to the subject of an immuno-oncology agent and an anti-CD73 antibody, wherein the immuno-oncology agent is an IDO antagonist. Suitable IDO antagonists include, for example, INCB-024360 (WO2006/122150, WO07/75598, WO08/36653, WO08/36642), indoximod, NLG-919 (WO09/73620, WO09/1156652, WO11/56652, WO12/142237) or F001287.

[0750] In one embodiment, a subject having a disease that may benefit from stimulation of the immune system, e.g., cancer or an infectious disease, is treated by administration to the subject of an immuno-oncology agent and an anti-CD73 antibody, wherein the immuno-oncology agent is a Toll-like receptor agonist, e.g., a TLR2/4 agonist (e.g., Bacillus Calmette-Guerin); a TLR7 agonist (e.g., Hiltonol or Imiquimod); a TLR7/8 agonist (e.g., Resiquimod); or a TLR9 agonist (e.g., CpG7909).

[0751] In one embodiment, a subject having a disease that may benefit from stimulation of the immune system, e.g., cancer or an infectious disease, is treated by administration to the subject of an immuno-oncology agent and an anti-CD73 antibody, wherein, the immuno-oncology agent is a TGF-β inhibitor, e.g., GC1008, LY2157299, TEW7197, or IMC-TR1.

[0752] In one aspect, an anti-CD73 antibody is sequentially administered prior to administration of a second agent, e.g., an immuno-oncology agent. In one aspect, an anti-CD73 antibody is administered concurrently with the second agent, e.g., an immunology-oncology agent. In yet one aspect, an anti-CD73 antibody is sequentially administered after administration of the second agent. The administration of the two agents may start at times that are, e.g., 30 minutes, 60 minutes, 90 minutes, 120 minutes, 3 hours, 6 hours, 12 hours, 24 hours, 36 hours, 48 hours, 3 days, 5 days, 7 days, or one or more weeks apart, or administration of the second agent may start, e.g., 30 minutes, 60 minutes, 90 minutes, 120 minutes, 3 hours, 6 hours, 12 hours, 24 hours, 36 hours, 48 hours, 3 days, 5 days, 7 days, or one or more weeks after the first agent has been administered.

[0753] In certain aspects, an anti-CD73 antibody and a second agent, e.g., an immuno-oncology agent, are administered simultaneously, e.g., are infused simultaneously, e.g., over a period of 30 or 60 minutes, to a patient. An anti-CD73 antibody may be co-formulated with a second agent, e.g., an immuno-oncology agent.

[0754] Optionally, an anti-CD73 optionally in combination with one or more additional immunotherapeutic antibodies (e.g., anti-CTLA-4 and/or anti-PD-1 and/or anti-PD-L1 and/or anti-LAG-3 blockade) can be further combined with an immunogenic agent, such as cancerous cells, purified tumor antigens (including recombinant proteins, peptides, and carbohydrate molecules), cells, and cells transfected with genes encoding immune stimulating cytokines (He et al. (2004) J Immunol. 173:4919-28). Non-limiting examples of tumor vaccines that can be used include peptides of melanoma antigens, such as peptides of gp100, MAGE antigens, Trp-2, MART1 and/or tyrosinase, or tumor cells transfected to express the cytokine GM-CSF (discussed further below). A combined CD73 inhibition and one or more additional antibodies (e.g., CTLA-4 and/or PD-1 and/or PD-L1 and/or LAG-3 blockade) can also be further combined with standard cancer treatments. For example, a combined CD73 inhibition and one or more additional antibodies (e.g., CTLA-4 and/or PD-1 and/or PD-L1 and/or LAG-3 blockade) can be effectively combined with chemotherapeutic regimes. In these instances, it is possible to reduce the dose of other chemotherapeutic reagent administered with the combination of the instant disclosure (Mokyr et al. (1998) Cancer Research 58: 5301-5304). An example of such a combination is a combination of anti-CD73 antagonist antibody with or without and an additional antibody, such as anti-CTLA-4 antibodies and/or anti-PD-1 antibodies and/or anti-PD-L1 antibodies and/or anti-LAG-3 antibodies) further in combination with decarbazine for the treatment of melanoma. Another example is a combination of anti-CD73 antibody with or without and anti-CTLA-4 antibodies and/or anti-PD-1 antibodies and/or anti-PD-L1 antibodies and/or LAG-3 antibodies further in combination with interleukin-2 (IL-2) for the treatment of melanoma. The scientific rationale behind the combined use of CD73 inhibition and CTLA-4 and/or PD-1 and/or PD-L1 and/or LAG-3 blockade with chemotherapy is that cell death, which is a consequence of the cytotoxic action of most chemotherapeutic compounds, should result in increased levels of tumor antigen in the antigen presentation pathway. Other combination therapies that may result in synergy with a combined CD73 inhibition with or without and CTLA-4 and/or PD-1 and/or PD-L1 and/or LAG-3 blockade through cell death include radiation, surgery, or hormone deprivation. Each of these protocols creates a source of tumor antigen in the host. Angiogenesis inhibitors can also be combined with a combined CD73 inhibition and CTLA-4 and/or PD-1 and/or PD-L1 and/or LAG-3 blockade. Inhibition of angiogenesis leads to tumor cell death, which can be a source of tumor antigen fed into host antigen presentation pathways.

[0755] An anti-CD73 antagonist antibody optionally in combination with CTLA-4 and/or PD-1 and/or PD-L1 and/or LAG-3 blocking antibodies can also be used in combination with bispecific antibodies that target Fcα or Fcγ receptor-expressing effector cells to tumor cells (see, e.g., U.S. Pat. Nos. 5,922,845 and 5,837,243). Bispecific antibodies can be used to target two separate antigens. The T cell arm of these responses would be augmented by the use of a combined CD73 inhibition and CTLA-4 and/or PD-1 and/or PD-L1 and/or LAG-3 blockade.

[0756] In another example, an anti-CD73 antagonist antibody optionally in combination with an additional immunostimulating agent, e.g., anti-CTLA-4 antibody and/or anti-PD-1 antibody and/or anti-PD-L1 antibody and/or LAG-3 agent, e.g., antibody, can be used in conjunction with an anti-neoplastic antibody, such as Rituxan® (rituximab), Herceptin® (trastuzumab), Bexxar® (tositumomab), Zevalin® (ibritumomab), Campath® (alemtuzumab), Lymphocide® (eprtuzumab), Avastin® (bevacizumab), and Tarceva® (erlotinib), and the like. By way of example and not wishing to be bound by theory, treatment with an anti-cancer antibody or an anti-cancer antibody conjugated to a toxin can lead to cancer cell death (e.g., tumor cells) which would potentiate an immune response mediated by the immunostimulating agent, e.g., CD73, CTLA-4, PD-1, PD-L1 or LAG-3 agent, e.g., antibody. In an exemplary embodiment, a treatment of a hyperproliferative disease (e.g., a cancer tumor) can include an anti-cancer agent, e.g., antibody, in combination with anti-CD73 and optionally an additional immunostimulating agent, e.g., anti-CTLA-4 and/or anti-PD-1 and/or anti-PD-L1 and/or anti-LAG-3 agent, e.g., antibody, concurrently or sequentially or any combination thereof, which can potentiate an anti-tumor immune responses by the host.

[0757] Tumors evade host immune surveillance by a large variety of mechanisms. Many of these mechanisms may be overcome by the inactivation of proteins, which are expressed by the tumors and which are immunosuppressive. These include, among others, TGF-β (Kehrl et al. (1986) J. Exp. Med. 163: 1037-1050), IL-10 (Howard & O'Garra (1992) Immunology Today 13: 198-200), and Fas ligand (Hahne et al. (1996) Science 274: 1363-1365). Antibodies to each of these entities can be further combined with an anti-CD73 antibody with or without an additional immunostimulating agent, e.g., an anti-CTLA-4 and/or anti-PD-1 and/or anti-PD-L1 and/or anti-LAG-3 agent, such as antibody, to counteract the effects of immunosuppressive agents and favor anti-tumor immune responses by the host.

[0758] Other agents, e.g., antibodies, that can be used to activate host immune responsiveness can be further used in combination with an anti-CD73 antibody with or without an additional immunostimulating agent, such as anti-CTLA-4 and/or anti-PD-1 and/or anti-PD-L1 and/or anti-LAG-3 antibody. These include molecules on the surface of dendritic cells that activate DC function and antigen presentation. Anti-CD40 antibodies (Ridge et al., supra) can be used in conjunction with an anti-CD73 antibody and optionally an additional immunostimulating agent, e.g., an anti-CTLA-4 and/or anti-PD-1 and/or anti-PD-L1 and/or anti-LAG-3 agent, e.g., antibody. Other activating antibodies to T cell costimulatory molecules Weinberg et al., supra, Melero et al. supra, Hutloff et al., supra, may also provide for increased levels of T cell activation.

[0759] As discussed above, bone marrow transplantation is currently being used to treat a variety of tumors of hematopoietic origin. Anti-CD73 immunotherapy alone or combined with CTLA-4 and/or PD-1 and/or PD-L1 and/or LAG-3 blockade can be used to increase the effectiveness of the donor engrafted tumor specific T cells.

[0760] Several experimental treatment protocols involve ex vivo activation and expansion of antigen specific T cells and adoptive transfer of these cells into recipients in order to antigen-specific T cells against tumor (Greenberg & Riddell, supra). These methods can also be used to activate T cell responses to infectious agents such as CMV. Ex vivo activation in the presence of anti-CD73 with or without an additional immunostimulating therapy, e.g., anti-CTLA-4 and/or anti-PD-1 and/or anti-PD-L1 and/or anti-LAG-3 antibodies can be expected to increase the frequency and activity of the adoptively transferred T cells.

[0761] Provided herein are methods for altering an adverse event associated with treatment of a hyperproliferative disease (e.g., cancer) with an immunostimulatory agent, comprising administering an anti-CD73 antibody with a subtherapeutic dose of anti-CTLA-4 and/or anti-PD-1 and/or anti-PD-L1 and/or anti-LAG-3 agent, e.g., antibody, to a subject. For example, the methods described herein provide for a method of reducing the incidence of immunostimulatory therapeutic antibody-induced colitis or diarrhea by administering a non-absorbable steroid to the patient. As used herein, a “non-absorbable steroid” is a glucocorticoid that exhibits extensive first pass metabolism such that, following metabolism in the liver, the bioavailability of the steroid is low, i.e., less than about 20%. In one embodiment described herein, the non-absorbable steroid is budesonide. Budesonide is a locally-acting glucocorticosteroid, which is extensively metabolized, primarily by the liver, following oral administration. ENTOCORT EC® (Astra-Zeneca) is a pH- and time-dependent oral formulation of budesonide developed to optimize drug delivery to the ileum and throughout the colon. ENTOCORT EC® is approved in the U.S. for the treatment of mild to moderate Crohn's disease involving the ileum and/or ascending colon. The usual oral dosage of ENTOCORT EC® for the treatment of Crohn's disease is 6 to 9 mg/day. ENTOCORT EC® is released in the intestines before being absorbed and retained in the gut mucosa. Once it passes through the gut mucosa target tissue, ENTOCORT EC® is extensively metabolized by the cytochrome P450 system in the liver to metabolites with negligible glucocorticoid activity. Therefore, the bioavailability is low (about 10%). The low bioavailability of budesonide results in an improved therapeutic ratio compared to other glucocorticoids with less extensive first-pass metabolism. Budesonide results in fewer adverse effects, including less hypothalamic-pituitary suppression, than systemically-acting corticosteroids. However, chronic administration of ENTOCORT EC® can result in systemic glucocorticoid effects such as hypercorticism and adrenal suppression. See PDR 58^{th} ed. 2004; 608-610.

[0762] In still further embodiments, a CD73 inhibition with CTLA-4 and/or PD-1 and/or PD-L1 and/or LAG-3 blockade (i.e., immunostimulatory therapeutic antibodies anti-CD73 and optionally anti-CTLA-4 and/or anti-PD-1 and/or anti-PD-L1 and/or anti-LAG-3 antibodies) in conjunction with a non-absorbable steroid can be further combined with a salicylate. Salicylates include 5-ASA agents such as, for example: sulfasalazine (AZULFIDINE®, Pharmacia & UpJohn); olsalazine (DIPENTUM®, Pharmacia & UpJohn); balsalazide (COLAZAL®, Salix Pharmaceuticals, Inc.); and mesalamine (ASACOL®, Procter & Gamble Pharmaceuticals; PENTASA®, Shire US; CANASA®, Axcan Scandipharm, Inc.; ROWASA®, Solvay).

[0763] In accordance with the methods described herein, a salicylate administered in combination with anti-CD73 with anti-CTLA-4 and/or anti-PD-1 and/or anti-PD-L1 and/or LAG-3 antibodies and a non-absorbable steroid can includes any overlapping or sequential administration of the salicylate and the non-absorbable steroid for the purpose of decreasing the incidence of colitis induced by the immunostimulatory antibodies. Thus, for example, methods for reducing the incidence of colitis induced by the immunostimulatory antibodies described herein encompass administering a salicylate and a non-absorbable concurrently or sequentially (e.g., a salicylate is administered 6 hours after a non-absorbable steroid), or any combination thereof. Further, a salicylate and a non-absorbable steroid can be administered by the same route (e.g., both are administered orally) or by different routes (e.g., a salicylate is administered orally and a non-absorbable steroid is administered rectally), which may differ from the route(s) used to administer the anti-CD73 and anti-CTLA-4 and/or anti-PD-1 and/or anti-PD-L1 and/or anti-LAG-3 antibodies.

[0764] The anti-CD73 antibodies and combination antibody therapies described herein may also be used in conjunction with other well known therapies that are selected for their particular usefulness against the indication being treated (e.g., cancer). Combinations of the anti-CD73 antibodies described herein may be used sequentially with known pharmaceutically acceptable agent(s).

[0765] For example, the anti-CD73 antibodies and combination antibody therapies described herein can be used in combination (e.g., simultaneously or separately) with an additional treatment, such as irradiation, chemotherapy (e.g., using camptothecin (CPT-11), 5-fluorouracil (5-FU), cisplatin, doxorubicin, irinotecan, paclitaxel, gemcitabine, cisplatin, paclitaxel, carboplatin-paclitaxel (Taxol), doxorubicin, 5-fu, or camptothecin+apo21/TRAIL (a 6X combo)), one or more proteasome inhibitors (e.g., bortezomib or MG132), one or more Bc1-2 inhibitors (e.g., BH3I-2′ (bcl-xl inhibitor), indoleamine dioxygenase-1 (IDO1) inhibitor (e.g., INCB24360), AT-101 (R-(−)-gossypol derivative), ABT-263 (small molecule), GX-15-070 (obatoclax), or MCL-1 (myeloid leukemia cell differentiation protein-1) antagonists), iAP (inhibitor of apoptosis protein) antagonists (e.g., smac7, smac4, small molecule smac mimetic, synthetic smac peptides (see Fulda et al., Nat Med 2002; 8:808-15), ISIS23722 (LY2181308), or AEG-35156 (GEM-640)), HDAC (histone deacetylase) inhibitors, anti-CD20 antibodies (e.g., rituximab), angiogenesis inhibitors (e.g., bevacizumab), anti-angiogenic agents targeting VEGF and VEGFR (e.g., Avastin), synthetic triterpenoids (see Hyer et al., Cancer Research 2005; 65:4799-808), c-FLIP (cellular FLICE-inhibitory protein) modulators (e.g., natural and synthetic ligands of PPARγ (peroxisome proliferator-activated receptor y), 5809354 or 5569100), kinase inhibitors (e.g., Sorafenib), Trastuzumab, Cetuximab, Temsirolimus, mTOR inhibitors such as rapamycin and temsirolimus, Bortezomib, JAK2 inhibitors, HSP90 inhibitors, PI3K-AKT inhibitors, Lenalildomide, GSK3P inhibitors, IAP inhibitors and/or genotoxic drugs.

[0766] The anti-CD73 antibodies and combination antibody therapies described herein can further be used in combination with one or more anti-proliferative cytotoxic agents. Classes of compounds that may be used as anti-proliferative cytotoxic agents include, but are not limited to, the following:

[0767] Alkylating agents (including, without limitation, nitrogen mustards, ethylenimine derivatives, alkyl sulfonates, nitrosoureas and triazenes): Uracil mustard, Chlormethine, Cyclophosphamide (CYTOXAN™) fosfamide, Melphalan, Chlorambucil, Pipobroman, Triethylenemelamine, Triethylenethiophosphoramine, Busulfan, Carmustine, Lomustine, Streptozocin, Dacarbazine, and Temozolomide.

[0768] Antimetabolites (including, without limitation, folic acid antagonists, pyrimidine analogs, purine analogs and adenosine deaminase inhibitors): Methotrexate, 5-Fluorouracil, Floxuridine, Cytarabine, 6-Mercaptopurine, 6-Thioguanine, Fludarabine phosphate, Pentostatine, and Gemcitabine.

[0769] Suitable anti-proliferative agents for combining with antagonist anti-CD73 antibodies, without limitation, taxanes, paclitaxel (paclitaxel is commercially available as TAXOL™), docetaxel, discodermolide (DDM), dictyostatin (DCT), Peloruside A, epothilones, epothilone A, epothilone B, epothilone C, epothilone D, epothilone E, epothilone F, furanoepothilone D, desoxyepothilone Bl, [17]-dehydrodesoxyepothilone B, [18]dehydrodesoxyepothilones B, C12,13-cyclopropyl-epothilone A, C6-C8 bridged epothilone A, trans-9,10-dehydroepothilone D, cis-9,10-dehydroepothilone D, 16-desmethylepothilone B, epothilone B10, discoderomolide, patupilone (EPO-906), KOS-862, KOS-1584, ZK-EPO, ABJ-789, XAA296A (Discodermolide), TZT-1027 (soblidotin), ILX-651 (tasidotin hydrochloride), Halichondrin B, Eribulin mesylate (E-7389), Hemiasterlin (HTI-286), E-7974, Cyrptophycins, LY-355703, Maytansinoid immunoconjugates (DM-1), MKC-1, ABT-751, T1-38067, T-900607, SB-715992 (ispinesib), SB-743921, MK-0731, STA-5312, eleutherobin, 17beta-acetoxy-2-ethoxy-6-oxo-B-homo-estra-1,3,5(10)-trien-3-ol, cyclostreptin, isolaulimalide, laulimalide, 4-epi-7-dehydroxy-14,16-didemethyl-(+)-discodermolides, and cryptothilone 1, in addition to other microtubuline stabilizing agents known in the art.

[0770] In cases where it is desirable to render aberrantly proliferative cells quiescent in conjunction with or prior to treatment with anti-CD73 antibodies described herein, hormones and steroids (including synthetic analogs), such as 17a-Ethinylestradiol, Diethylstilbestrol, Testosterone, Prednisone, Fluoxymesterone, Dromostanolone propionate, Testolactone, Megestrolacetate, Methylprednisolone, Methyl-testosterone, Prednisolone, Triamcinolone, Chlorotrianisene, Hydroxyprogesterone, Aminoglutethimide, Estramustine, Medroxyprogesteroneacetate, Leuprolide, Flutamide, Toremifene, ZOLADEX™, can also be administered to the patient. When employing the methods or compositions described herein, other agents used in the modulation of tumor growth or metastasis in a clinical setting, such as antimimetics, can also be administered as desired.

[0771] Methods for the safe and effective administration of chemotherapeutic agents are known to those skilled in the art. In addition, their administration is described in the standard literature. For example, the administration of many of the chemotherapeutic agents is described in the Physicians' Desk Reference (PDR), e.g., 1996 edition (Medical Economics Company, Montvale, N.J. 07645-1742, USA); the disclosure of which is incorporated herein by reference thereto.

[0772] The chemotherapeutic agent(s) and/or radiation therapy can be administered according to therapeutic protocols well known in the art. It will be apparent to those skilled in the art that the administration of the chemotherapeutic agent(s) and/or radiation therapy can be varied depending on the disease being treated and the known effects of the chemotherapeutic agent(s) and/or radiation therapy on that disease. Also, in accordance with the knowledge of the skilled clinician, the therapeutic protocols (e.g., dosage amounts and times of administration) can be varied in view of the observed effects of the administered therapeutic agents on the patient, and in view of the observed responses of the disease to the administered therapeutic agents.

### VIII. Kits and Unit Dosage Forms

[0773] Also provided herein are kits which include a pharmaceutical composition containing an anti-CD73 antibody (e.g., CD73.4-IgG2/IgG1.1f) and an immuno-oncology agent (e.g., anti-PD-1 antibody such as nivolumab), and a pharmaceutically-acceptable carrier, in a therapeutically effective amount adapted for use in the preceding methods. The kits optionally also can include instructions, e.g., comprising administration schedules, to allow a practitioner (e.g., a physician, nurse, or patient) to administer the composition contained therein to administer the composition to a patient having cancer (e.g., a solid tumor). The kit also can include a syringe.

[0774] Optionally, the kits include multiple packages of the single-dose pharmaceutical compositions each containing an effective amount of the anti-CD73 or immuno-oncology agent (e.g., anti-PD-1 antibody) for a single administration in accordance with the methods provided above. Instruments or devices necessary for administering the pharmaceutical composition(s) also may be included in the kits. For instance, a kit may provide one or more pre-filled syringes containing an amount of the anti-CD73 or anti-PD-1 antibody.

[0775] In one embodiment, the present invention provides a kit for treating a solid tumor in a human patient, the kit comprising:

[0776] (a) a dose of an anti-CD73 antibody comprising CDR1, CDR2 and CDR3 domains of the heavy chain variable region having the sequence set forth in SEQ ID NO: 135, and CDR1, CDR2 and CDR3 domains of the light chain variable region having the sequence set forth in SEQ ID NO: 8 or 12;

[0777] (b) a dose of an anti-PD-1 antibody comprising CDR1, CDR2 and CDR3 domains of the heavy chain variable region having the sequence set forth in SEQ ID NO: 381, and CDR1, CDR2 and CDR3 domains of the light chain variable region having the sequence set forth in SEQ ID NO: 382; and

[0778] (c) instructions for using the anti-CD73 antibody and anti-PD-1 antibody in the methods described herein.

[0779] The present disclosure is further illustrated by the following examples, which should not be construed as further limiting. The contents of all figures and all references, Genbank sequences, patents and published patent applications cited throughout this application are expressly incorporated herein by reference. In particular, the disclosures of PCT publications WO09/045957, WO09/073533, WO09/073546, WO09/054863, WO2016/075099, WO2016/055609, PCT/US2013/072918, PCT/US15/61639 and U.S. Patent Publication Nos. 2011/0150892 and 2016/129108 are expressly incorporated herein by reference.

### EXAMPLES

### Example 1: Generation of Human Anti-CD73 Antibodies

[0780] Human anti-human CD73 monoclonal antibodies were generated in Hco7, Hco27, Hco20, Hco12, Hco17, and Hc2 strains of HuMAb® transgenic mice (“HuMAb” is a Trade Mark of Medarex, Inc., Princeton, N.J.) and KM mice (the KM Mouse® strain contains the SC20 transchromosome as described in PCT Publication WO 02/43478). HC2/KCo27 HuMAb mice and KM mice were generated as described in U.S. Pat. Nos. 5,770,429 and 5,545,806, the entire disclosures of which are hereby incorporated by reference.

[0781] Mice, including various genotypes of transgenic mice (such as, KM, Hco7, Hco27, Hco20, Hco12, Hco17 and Hc2), were immunized with different immunization strategies (different antigen, different dose, duration, routes of administration (footpad (fp), intraperitoneal (ip) and subcutaneous (sc) and adjuvant (CFA/IFA, Ribi and antibody), etc). Fusions from the mice were performed and screened, and antibodies were identified from these fusions. Further characterization led to the isolation of antibodies of particular interest, including the antibodies designated as 11F11-1, 11F11-2, 4C3-1, 4C3-2, 4C3-3, 4D4-1, 10D2-1, 10D2-2, 11A6-1, 24H2-1, 5F8-1, 5F8-2, 6E11-1, and 7A11-1. Table 7 (below) provides the IgG isotype and allotype of the heavy chains, as well as the type of light chain, for each antibody. Antibodies that differ only in the light chain are represented by a different digit after the dash. For example, 11F11-1 has the same heavy chain as 11F11-2, but 11F11-1 has the light chain VK1, whereas 11F11-2 has the light chain VK2. Unless specified otherwise, recombinant antibodies based on VH regions of the antibodies in the table were made with the predominant light chain.

TABLE 7

| | | Predominant | Other Expressed |
|---|---|---|---|
| Clone | Isotype | Light Chain | Light Chains |
| 11F11 | IgG2 | VK2 | VK1 |
| 4C3 | IgG1za | VK1 | VK2, VK3 |
| 4D4 | IgG2 | VK1 | |
| 10D2 | IgG4 | VK2 | VK1 |
| 11A6 | IgG1za | VK1 | |
| 24H2 | IgG4 | VK1 | |
| 5F8 | IgG1za | VK1 | VK2 |
| 6E11 | IgG1za | VK1 | |
| 7A11 | IgG1za | VK1 | |

The amino acid and nucleotide sequences of the full length sequence of the heavy and light chains, the VH and VL domains and the CDRs of each antibody are provided in the Sequence Listing and in Table 37. The VH and VL amino acid sequences are also provided in FIGS. 1A through 17B, and an alignment of the VH and VL amino acid sequences of the various antibodies is provided in FIG. 35 (CDR sequences are in bold).

### Example 2: Amino Acid Substitutions in Variable Regions and Isotype Variations

[0782] The framework region of the VH region of antibody 11F11 was mutated by introducing one of more of the mutation at the following amino acid residues (surrounding amino acids are shown and the mutated amino acid is underlined): T25 (framework mutation; . . . RLSCATSGFTF . . . ) (SEQ ID NO: 469), L52 (CDR2 mutation; . . . WVAVILYDGSN . . . ) (SEQ ID NO: 471), G54 (CDR2 mutation; . . . VILYDGSNKYY . . . ) (SEQ ID NO: 472) and V94 (framework mutation; . . . AEDTAVYYCAR . . . ) (SEQ ID NO: 470). The names of the constructs and the substitutions in each of them are set forth in Table 8:

TABLE 8

| | Originating | |
|---|---|---|
| Ab Name | Ab | Substitution |
| CD73.3 | 4C3 | V94A |
| CD73.4 | 11F11 | T25A |
| CD73.5 | | T25S |
| CD73.6 | | T25A, G54S |
| CD73.7 | | T25S, G54S |
| CD73.8 | | T25A, L52W, G54S |
| CD73.9 | | T255, L52W, G54S |
| CD73.10 | | T25A, L52W, G54E |
| CD73.11* | 4D4 | A25, W52, E54 |

*CD73.11 is 4D4 and contained these amino acid residues as isolated. It is listed in the Table for comparative purposes.

[0783] The constant region of antibodies 11F11 and 4D4 was also modified, by switching it to an IgG2 constant region (CH1, hinge, CH2 and CH3) with a C219S substitution (“IgG2CS”; SEQ ID NO:267), an effectorless IgG1 constant region with the substitutions L234A, L235E, G237A, A330S and P331S (“IgG1.1f”; SEQ ID NO:268) or an effectorless IgG1/IgG2 hybrid constant region that contains a CH1 and hinge from IgG2 (with C219S) and CH2 and CH3 of IgG1 (with A330S/P331S) (“IgG2CS-IgG1.1f” or “IgG2C219S-IgG1.1f”; SEQ ID NO:169). The constructs that were made are listed in Table 9.

TABLE 9

| | Originating | VH | Constant | Name |
|---|---|---|---|---|
| Ab Name | Ab | substitution | region | of Ab |
| CD73.4 | 11F11 | T25A | IgG2CS | CD73.4-IgG2CS |
| CD73.4 | | T25A | IgG2CS- | CD73.4-IgG2CS |
| | | | IgG1.1f | IgG1.1f |
| CD73.6 | | T25A, | IgG2CS- | CD73.6-IgG2CS |
| | | G54S | IgG1.1f | IgG1.1f |
| CD73.8 | | T25A, | IgG2CS- | CD73.8-IgG2CS |
| | | L52W, | IgG1.1f | IgG1.1f |
| | | G54S | | |
| CD73.10 | | T25A, | IgG2CS- | CD73.10- |
| | | L52W, | IgG1.1f | IgG2CS |
| | | G54E | | IgG1.1f |
| CD73.10 | | T25A, | IgG1.1f | CD73.10- |
| | | L52W, | | IgG1.1f |
| | | G54E | | |
| CD73.10 | | T25A, | IgG2CS | CD73.10- |
| | | L52W, | | IgG2CS |
| | | G54E | | |
| CD73.11 | 4D4 | A25, | IgG2CS | CD73.11- |
| | | W52, | | IgG2CS |
| | | E54 | | |

The amino acid sequence of CD73.4-IgG2CS IgG1.1f is shown in FIG. 18 (SEQ ID NO: 189).

[0784] Abs CD73.3-CD73.11 were made as follows. Light chain VK2 (SEQ ID NO: 102) was used for the antibodies deriving from 11F11 (CD73.4, CD73.6, CD73.8 and CD73.10). The heavy and light chains were expressed in HEK293-6E cells and culture media were harvested 5 days after transfection.

[0785] Binding of the constructs to human FcγRs was measured via SPR. hCD64 and hCD32a-H131 binding data for IgG1.1 and IgG2 molecules were consistent with expected values for the different Fcs. IgG1.1f is the most inert Fc. IgG2 and IgG2-C219S showed typical FcR binding for IgG2. As expected, data for IgG2-C219S-G1.1f suggests significantly weaker binding than wild type IgG1 or IgG2, but increased binding compared to IgG1.1f. IgG2-C219S-G1.1f had weak hCD32a-H131 binding (K_{D} of 2.3 μM) and the binding affinity to all other FcγRs were less than 5 μM. Binding affinity of IgG2-C219S-G1.1f to cyno FcγRs was more than 5 μM. SPR analysis of binding IgG2-C219S-G1.1f to human FcRn showed pH-dependent binding (strong at pH6, and weak binding with fast dissociation at pH 7.4).

[0786] The recombinant preparations were found to frequently lack the C-terminal Lys of the heavy chain. For example, 97% of the heavy chains of Ab CD73.4.IgG2-C219S-G1.1f lacked the C-terminal lysine. Certain preparations had pyro-Q at the N-terminal Q (glutamine) of the heavy chain. For example, 94% of the N-terminal glutamine of the heavy chain of Ab CD73.4.IgG2-C219S-G1.1f was pyro-Q.

### Example 3: Binding Characteristics of Anti-CD73 Antibodies

### A. Surface Plasmon Resonance (SPR)

[0787] CD73 binding kinetics and affinity were studied by surface Plasmon Resonance (SPR) using a Biacore T100 instrument (GE Healthcare) at 25° C.

[0788] One experimental format tested the binding of the N-terminal domain of hCD73 (consisting of residues 26-336 of human CD73; termed N-hCD73) to antibodies that were captured on immobilized protein A surfaces. For these experiments, protein A (Pierce) was immobilized to a density of 3000-4000 RU on flow cells 1-4 of a CM5 sensor chip (GE Healthcare) using standard ethyl(dimethylaminopropyl) carbodiimide (EDC)/N-hydroxysuccinimide (NETS) chemistry, with ethanolamine blocking, in a running buffer of 0.01 M HEPES pH 7.4, 0.15 M NaCl, 3 mM EDTA, 0.005% v/v tween 20. Kinetic experiments were performed by first capturing antibodies (5-10 ug/ml) on the protein A surfaces using a 30 s contact time at 10 ul/min, with binding of 600, 200, 66.7, 22.2, 7.4, and 2.5 nM N-hCD73-his, using a 180 s association time and 360 s dissociation time at a flow rate of 30 ul/min. The running buffer for the kinetic experiments was 10 mM sodium phosphate, 130 mM sodium chloride, 0.05% tween 20, pH 7.1. The surfaces were regenerated after each cycle using two 30 s pulses of 10 mM glycine pH 1.5 at a flow rate of 30 μl/min. Sensogram data was double-referenced and then fitted to a 1:1 Langmuir model using Biacore T100 evaluation software v2.0.4, to determine the association rate constant (ka), the dissociation rate constant (kd), and the equilibrium dissociation constant (KD).

[0789] The results are shown in Table 10. The table compiles data from different experiments. For antibodies for which two or more sets of numbers are shown, each set corresponds to data obtained in a separate experiment.

TABLE 10
Kinetics of CD73 mAbs binding to N-hCD73-his
(hCD73(26-336)His) at 25° C.

| mAb | Fc | ka (1/Ms) | kd (1/s) | KD (nM) |
|---|---|---|---|---|
| 11F11 | IgG2 | 2.6E + 05 | 4.2E − 04 | 1.6 |
| | | 2.9E + 05 | 1.6E − 04 | 0.56 |
| 4C3 | IgG1 | 2.2E + 04 | 2.4E − 03 | 110 |
| | | 2.4E + 04 | 2.2E − 03 | 92 |
| 4D4 | IgG2 | 8.2E + 04 | 7.7E − 04 | 9.4 |
| | | 7.9E + 04 | 4.9E − 04 | 6.2 |
| 10D2 | IgG4 | 6.1E + 05 | 9.5E − 04 | 1.6 |
| 11A6 | IgG1 | 5.5E + 04 | 7.6E − 03 | 140 |
| 1H9 | IgG1 | 3.3E + 05 | 9.3E − 04 | 2.8 |
| 24H2 | IgG4 | 2.3E + 05 | 3.2E − 03 | 14 |
| 5F8 | IgG1 | 1.5E + 05 | 6.0E − 03 | 41 |
| 6E11 | IgG1 | 5.7E + 04 | 1.4E − 03 | 25 |
| 7A11 | IgG1 | 8.8E + 05 | 3.8E − 04 | 0.43 |
| CD73.4 | IgG1.1f | 4.2E + 05 | 3.9E − 04 | 0.92 |
| CD73.4 | IgG2-C219S | 2.9E + 05 | 1.6E − 04 | 0.55 |
| | | 2.8E + 05 | 3.3E − 04 | 1.2 |
| | | 2.9E + 05 | 3.7E − 04 | 1.3 |
| | | 3.5E + 05 | 4.4E − 04 | 1.2 |
| CD73.4 | IgG2-C219S-IgG1.1f | 3.1E + 05 | 3.5E − 04 | 1.1 |
| | | 3.3E + 05 | 1.4E − 04 | 0.43 |
| | | 3.1E + 05 | 1.3E − 04 | 0.42 |
| | | 3.2E + 05 | 1.5E − 04 | 0.47 |
| | | 3.1E + 05 | 4.1E − 04 | 1.4 |
| | | 2.7E + 05 | 3.8E − 04 | 1.4 |
| | | 3.0E + 05 | 4.1E − 04 | 1.4 |
| | | 3.1E + 05 | 4.2E − 04 | 1.3 |
| | | 3.2E + 05 | 4.3E − 04 | 1.3 |
| | | 2.9E + 05 | 4.0E − 04 | 1.4 |
| CD73.10 | IgG1.1f | 2.7E + 05 | 1.3E − 03 | 4.7 |
| CD73.10 | IgG2-C219S | 2.2E + 05 | 1.4E − 03 | 6.2 |
| | | 2.2E + 05 | 1.8E − 03 | 8.3 |
| CD73.10 | IgG2-C219S-IgG1.1f | 2.4E + 05 | 1.4E − 03 | 5.7 |
| | | 2.3E + 05 | 1.60E − 03 | 6.8 |
| CD73.3 | IgG1.1f | 1.6E + 04 | 3.6E − 03 | 220 |
| CD73.11 | IgG2-C219S | 8.0E + 04 | 2.8E − 04 | 3.5 |
| | | 7.9E + 04 | 5.1E − 04 | 6.5 |
| CD73.6 | IgG1.1f | 3.7E + 05 | 2.5E − 04 | 0.68 |
| CD73.6 | IgG2-C219S-IgG1.1f | 3.0E + 05 | 2.2E − 04 | 0.72 |

[0790] The K_{D} in the table is the monovalent K_{D}, i.e., K_{D} of binding of the antibodies to the N-terminal portion of human CD73, which is monovalent.

[0791] The G54S mutation is tolerated and appears to slightly increase affinity, while removing the predicted DG isomerization site. The L52W mutation appears to cause a decrease in affinity of approximately 10 fold. The 4D4 variants have unique CDR3 sequences and different kinetics (slower association compared to 11F11 molecules).

[0792] The average K_{D} from 10 experiments for CD73.4-IgG2-C219S-IgG1.1f is 1.1±0.4 nM. The T25A mutation relative to 11F11 does not impact the affinity.

[0793] The results show that all anti-CD73 antibodies bind to human CD73 with good affinity and have a slow dissociation rate.

[0794] The results of the binding studies indicate that binding activity was maintained following introduction of mutations into 11F11, 4C3 or 4D4, or isotype switch, although some antibodies had reduced affinity relative to the original antibody (i.e., 11F11, 4C3 or 4D4). In particular, CD73.10 (T25A, L52W, G54E) has a faster dissociation rate than CD73.4 (T25A) or CD73.11 (4D4). Comparison of all IgG2 molecules indicates that 11F11 and CD73.4 (11F11-T25A) have the highest monovalent CD73 affinity (KD=1.1 nM±0.4 nM). CD73.10 (11F11-T25A, L52W, G54E) has ˜10-fold lower CD73 affinity than 11F11 or CD73.4. This suggests either L52W or G54E or both mutations reduce CD73 affinity when in combination with other 11F11 sequences. 4D4 and CD73.11 have affinity comparable to CD73.10 (KD˜5 nM), but different kinetics. 4C3 epitope is believed to include regions of N- and C-domains of CD73, therefore the measured KD for an isolated N-domain is weak (KD=100-200 nM).

[0795] CD73.4-IgG2/IgG1.1, which has a K370N mutation ( . . . CLVNGFY . . . in the CH3 domain), was shown to bind to human CD73, as determined in an ELISA assay.

[0796] Binding of CD73.4-IgG2-C219S-IgG1.1f to cyno CD73 was also investigated. The specificity of CD73.4-IgG2-C219S-IgG1.1f for binding cynomolgus monkey CD73 was compared to that of binding to human CD73 by surface Plasmon resonance (SPR) using a Biacore T100 instrument (GE Healthcare) at 25° C. The full length extracellular domain of either human CD73 (consisting of residues 27-547 of human CD73 linked to a His tag, termed hCD73-his) or cynomolgus CD73 (consisting of residues 27-547 of cynomolgus CD73 linked to a His tag, termed cy-CD73-his) were tested for binding to antibodies that were captured on immobilized protein A surfaces. For these experiments, protein A (Pierce) was immobilized to a density of 3000-4000 RU on flow cells 1-4 of a CM5 sensor chip (GE Healthcare) using standard ethyl(dimethylaminopropyl) carbodiimide (EDC)/N-hydroxysuccinimide (NHS) chemistry, with ethanolamine blocking, in a running buffer of 0.01 M HEPES pH 7.4, 0.15 M NaCl, 3 mM EDTA, 0.005% v/v tween 20. Experiments were performed by first capturing antibodies (5-10 ug/ml) on the protein A surfaces using a 30 s contact time at 10 ul/min, with binding of 600, 200, 66.7, 22.2, 7.4, and 2.5 nM hCD73-his or cyno-CD73-his, using a 180 s association time and 360 s dissociation time at a flow rate of 30 ul/min. The running buffer for these experiments was 10 mM sodium phosphate, 130 mM sodium chloride, 0.05% tween 20, pH 7.1. The surfaces were regenerated after each cycle using two 30 s pulses of 10 mM glycine pH 1.5 at a flow rate of 30 μl/min.

[0797] The results, which are shown in FIG. 19, indicate that CD73.4-IgG2-C219S-IgG1.1f binds with similar affinity and kinetics to cyno and human CD73. CD73.4-IgG2-C219S-IgG1.1f binds to full length human and cyno CD73 dimer with a K_{D} of less than 1 nM. No significant cross-reactivity of CD73.4-IgG2-C219S-IgG1.1f to mouse or rat CD73 was observed.

[0798] The kinetics and affinity of an isolated Fab fragment from the 11F11 antibody was also evaluated by SPR. In these experiments, Fab domain from a murine anti-6×His antibody was immobilized on a CMS sensor chip using EDC/NHS to a density of 3000 RU. Full-length hCD73-his was captured to 10 RU density on Fc2 (1 ug/ml hCD73-his), 40 RU density on Fc3 (5 ug/ml hCD73-his) and 160 RU density on Fc4 (20 ug/ml hCD73-his), using a 30 s contact time at 10 ul/min. Next, the 11F11 Fab fragment (purified from pepsin-cleaved L-cysteine-reduced 11F11 antibody) was tested for binding at 400, 135, 44.4, 14.8, 4, 9, 1.7, 0.55 nM, using 180 s association time, 600 s dissociation time at 30 ul/min, in a running buffer of 10 mM sodium phosphate, 130 mM sodium chloride, 0.05% tween 20, pH 7.1. The surfaces were regenerated after each cycle using two 15 s pulses of 10 mM glycine pH 2.0 at a flow rate of 30 μl/min. Sensogram data was double-referenced and then fitted to a 1:1 Langmuir model using Biacore T100 evaluation software v2.0.4, to determine the association rate constant (ka), the dissociation rate constant (kd), and the equilibrium dissociation constant (K_{D}). The results are shown in Table 11 below.

TABLE 11
Kinetics of 11F11-Fab binding to
hCD73-his surface at 25° C.

| hCD73-his | | | |
|---|---|---|---|
| surface | ka | kd | K_{D} |
| density (RU) | (1/Ms) | (1/s) | (nM) |
| 10 | 1.2E + 06 | 8.7E − 04 | 0.73 |
| 40 | 1.2E + 06 | 8.7E − 04 | 0.73 |
| 160 | 1.1E + 06 | 8.5E − 04 | 0.77 |

[0799] Thus, the results show that the 11F11 Fab fragment has high affinity for hCD73 (K_{D}˜0.74 nM).

### B. Binding of CD73 Antibodies to CD73 Positive Cells

[0800] Titration binding curves were produced with CD73 antibodies on Calu6 (CD73 endogenous expressors; human pulmonary adenocarcinoma cell line), DMS114 (CD73 negative; human small cell lung cancer cell line), CHO-cynoCD73 (cynoCD73-transfected) and CHO-K1 (cynoCD73 negative), cells using Alexa Fluor® 647 Goat Anti-Human IgG (H+L) as a secondary antibody, Invitrogen Cat#A-21445, using the following method: 100000 cells were plated in 100 uL PBS+2% FBS per well and blocked for 20 min. Using a U-bottom 96-deep well plate, volumes of antibody and PBS+2% FBS were combined as dictated by Table 12 below.

TABLE 12

| | [Stock] | [Stain] | Vol | Vol TM |
|---|---|---|---|---|
| Clone | (mg/mL) | (mg/ml) | Ab (uL) | (uL) |
| 11F11 | 3.70 | 0.020 | 2.92 | 537.1 |
| CD73.10-IgG1.1f | 1.3 | 0.020 | 8.31 | 531.7 |
| CD73.10-IgG2 | 1 | 0.020 | 10.80 | 529.2 |
| CD73.10-IgG2CS-IgG1.1f | 1 | 0.020 | 1-/80 | 529.2 |
| CD73.4-IgG2 | 2.3 | 0.020 | 4.70 | 535.3 |
| CD73.4-IgG2CS-IgG1.1f | 2 | 0.020 | 5.40 | 534.6 |
| CD73.4-IgG1.1f | 2.3 | 0.020 | 4.70 | 535.3 |

[0801] An 8-point serial dilution was performed by diluting a sixth of the volume (90 uL) into 4504, PBS+2% FBS. The cell plate was spun down for 5 minutes at 1500 rpm. 100 uL of diluted antibody was added per well of the plate. 100 uL PBS+2% FBS were added to all other wells. The plates were stained on ice for 45 min, spun down at 1500 rpm for 5 min and washed twice in 200 uL PBS+2% FBS per well. Wells that had received unconjugated antibody, plus one unstained well per cell line, were resuspended in 100 uL APC anti-human secondary antibody (20 ug/mL). 100 uL PBS+2% FBS was added to all other wells, and stained on ice for 45 min. The plates were spun down at 1500 rpm for 5 min and washed in 200 uL PBS+2% FBS per well. The plates were washed again, resuspended in 200 uL 2% FBS in PBS per well and the samples were run.

[0802] The results, which are shown in FIGS. 20A1, 20A2, 20B1, 20B2, 20C1, 20C2, 20D1, 20D2, and Table 13, indicate that all the CD73 antibodies bind to cells that naturally express CD73 (Calu6 cells) and CHO cells transfected to express cyno CD73, but that the antibodies do not bind to cells that do not express CD73 (DMS114 and CHO-K1). The EC50 of binding obtained for each antibody are shown in Table 13.

TABLE 13

| | EC50 nM | EC50 nM |
|---|---|---|
| Antibody | Calu6 | CHO-cynoCD73 |
| 11F11 | 0.78 | 0.58 |
| CD73.10-IgG1.1f | 0.64 | 0.67 |
| CD73.10-IgG2 | 0.85 | 1.24 |
| CD73.10-IgG2CS-IgG1.1f | 0.85 | 1.27 |
| CD73.4-IgG2 | 0.49 | 0.34 |
| CD73.4-IgG2CS-IgG1.1f | 0.53 | 0.51 |
| CD73.4-IgG1.1f | 0.43 | 0.45 |

[0803] The EC50 of binding of CD73.4-IgG2-IgG1.1f to human tumor cell lines was 0.5 nM (range of 0.3 to 0.67 nM). The EC50 of binding of CD73.4-IgG2-IgG1.1f to cyno CD73 transfected CHO cells was 0.3 nM (range 0.1 to 0.5 nM).

[0804] Binding of CD73.4 antibody to human B and T cells was also determined. Peripheral blood mononuclear cells (PBMC) were isolated with Lympholyte-H cell separation gradient media. PBMC were incubated with serially diluted FITC-labeled CD73.4-IgG2, CD73.4-IgG2-IgG1.1f, or CD73.4-IgG1.1f antibodies, and T cells and B cells were identified with fluorochrome-labeled antibodies to CD3 and CD20. Cells from both donors were pooled for the unstained and FMO (Fluorescence minus one) control samples. The results, which are shown in FIGS. 20E and F and Table 14, indicate that the antibodies bind specifically to human B and T cells.

TABLE 14
IC50 of binding of CD73 antibodies to B and T cells

| | IC50 (nM) | IC50 (nM) |
|---|---|---|
| | B cells | T cells |
| D316 mAb-CD73.4-IgG2CS-IgG1.1f | 0.1648 | 0.1829 |
| D316 mAb-CD73.4-IgG2 | 0.1588 | 0.1799 |
| D316 mAb-CD73.4-IgG1.1f | 0.0994 | 0.1263 |
| D329 mAb-CD73.4-IgG2CS-IgG1.1f | 0.1454 | 0.2406 |
| D329 mAb-CD73.4-IgG2 | 0.07766 | 0.1348 |
| D329 mAb-CD73.4-IgG1.1f | 0.1356 | 0.2248 |

### C. Binding Affinity of CD73 Antibodies by Scatchard Analysis

[0805] CD73.4-IgG2CS-IgG1.1f (i.e., CD73.4-IgG2-C219S-IgG1.1f) was radioiodinated with ¹²⁵I-Na (1 mCi; PerkinElmer Catalog NEZ033H001MC) using IODO-GEN® solid-phase iodination reagent (1,3,4,6-tetrachloro-3a-6a-diphenyl glycouril; Pierce Catalog 28600). Excess iodide was removed using a desalting column (Pierce Catalog 43243). Fractions of labeled antibody were collected and analyzed for radioactivity on a Wizard 1470 gamma counter (PerkinElmer). The ¹²⁵I-CD73.4-IgG2CS-IgG1.1f concentration in each fraction was calculated with the Qubit® fluorometer from Invitrogen. Radiopurity was established by thin-layer chromatography (TLC) of peak protein and radioactive fractions (Pinestar Technology Catalog 151 005).

[0806] Binding of CD73.4-IgG2CS-IgG1.1f to human B cells: Binding to human B cells was demonstrated by incubating human B cells with a titration of ¹²⁵I-CD73.4-IgG2CS-IgG1.1f. Nonspecific binding was determined by binding in the presence of a titration of a 100-fold molar excess of unlabeled CD73.4-IgG2CS-IgG1.1f, which was then subtracted from total counts per minute (CPM) to calculate specific binding. A linear standard curve of ¹²⁵I-CD73.4-IgG2CS-IgG1.1f concentration versus CPM was used to extrapolate maximal nM bound ¹²⁵I-CD73.4-IgG2CS-IgG1.1f and thereby calculate receptor number per cell.

[0807] Binding of CD73.4-IgG2CS-IgG1.1f to human Calu-6 Cells. Binding to human lung tumor cells was demonstrated by incubating Calu-6 cells with a titration of ¹²⁵I-CD73.4-IgG2CS-IgG1.1f. Nonspecific binding was determined by binding in the presence of a titration of a 100-fold molar excess of unlabeled CD73.4-IgG2CS-IgG1.1f, which was then subtracted from total CPM to calculate specific binding. A linear standard curve of ¹²⁵I-CD73.4-IgG2CS-IgG1.1f concentration versus CPM was used to extrapolate maximal nM bound ¹²⁵I-CD73.4-IgG2CS-IgG1.1f and thereby calculate receptor number per cell.

[0808] Binding of CD73.4-IgG2CS-IgG1.1f to CHO-Cynomolgus CD73 transfectants. Binding to cyno CD73 was demonstrated by incubating CHO cells expressing cyno CD73 with a titration of ¹²⁵I-CD73.4-IgG2CS-IgG1.1f. Nonspecific binding was determined by binding in the presence of a titration of a 100-fold molar excess of unlabeled CD73.4-IgG2CS-IgG1.1f, which was then subtracted from total CPM to calculate specific binding. A linear standard curve of ¹²⁵I-CD73.4-IgG2CS-IgG1.1f concentration versus CPM was used to extrapolate maximal nM bound ¹²⁵I-CD73.4-IgG2CS-IgG1.1f and thereby calculate receptor number per cell.

[0809] Results of the Scatchard analysis showed that CD73.4-IgG2CS-IgG1.1f specifically bound to human B cells with an equilibrium dissociation constant (KD) of 0.03 nM (FIG. 20G), to human CD73 on Calu-6 cells with a K_{D} of 0.30 nM (FIG. 20H), and to CHO-cynoCD73 transfectants with a K_{D} of 0.04 nM (FIG. 20I).

[0810] Thus, CD73.4-IgG2CS-IgG1.1f was also shown to bind to CD73 expressed on cells with high affinity by Scatchard, further supporting the flow cytometric results.

### Example 4: Biophysical Characteristics of Anti-CD73 Antibodies

[0811] A. Size-Exclusion Chromatography Coupled to an in-Line Multi-Angle Light Scattering Detector (SEC-MALS)

[0812] The oligomeric state of CD73 mAbs were examined by size-exclusion chromatography coupled to an in-line multi-angle light scattering detector (SEC-MALS). Isocratic separations were performed on a Shodex PROTEIN KW-803 column connected to an Prominence Shimadzu UFLC in buffer containing 200 mM K₂HPO₄, 150 mM NaCl, pH 6.8, containing 0.02% Na azide (0.1 μm filtered) running at 0.5 mL/min. Samples were injected onto the column using a SIL-20AC Prominence Shimadzu autosampler, and data were obtained from three online detectors connected in series: a Prominence SPD-20AD diode array UV/vis spectrophotometer followed by a Wyatt miniDAWN™ TREOS Multi-Angle Light Scattering Detector then a Wyatt Optilab T-rEX Refractive Index Detector. Data (as shown in Table 15 below) were collected and analyzed using Astra (Wyatt) and Labsolutions (Shimadzu) software. The results are shown in Table 15.

B. Differential Scanning calorimetry (DSC)

[0813] The thermal stability of CD73 mAbs were determined using a MicroCal Capillary DSC instrument (GE Healthcare). Antibodies were analyzed at a concentrations of 0.5-0.75 mg/ml in PBS pH 7.1. To stabilize the DSC instrument baseline and obtain a consistent thermal history, multiple scans of buffer alone in both the sample and reference cell were recorded prior to sample analysis. Sample scans contained mAb in the sample cell and PBS pH 7.1 in the reference cell. All scans were run from 10-110° C. at a scan rate of 60°/hr using a 5 minute pre-cycle thermostat period and no post-cycle thermostat period. Data (as shown in Table 15 below) were analyzed using MicroCal Origin Cap DSC analysis software. The appropriate buffer-buffer blank scans were subtracted from the sample-buffer data, and the transition midpoint temperature (Tm) values were determined by fitting the data to a non-2-state model. The results are shown in Table 15. Tm1, Tm2 and Tm3 are the Tms for different domains in the antibodies.

TABLE 15
SEC-MALS and DSC

| | | | | | MALS | | | | |
|---|---|---|---|---|---|---|---|---|---|
| | | | | | Mass | | | | |
| | | | | | (main | DSC | DSC | DSC | DSC |
| | | SEC | SEC | SEC | peak/ | Tonset | Tm1 | Tm2 | Tm3 |
| mAb | Fc | % HMW | % Monomer | % LMW | monomer) | (° C.) | (° C.) | (° C.) | (° C.) |
| 7A11 | | 0.5 | 98.5 | 0.5 | 146.3 | 56.0 | 64.8 | 70.2 | 82.8 |
| 6E11 | | 2.1 | 97.6 | 0.1 | 145.2 | 55.0 | 62.3 | 72.0 | 83.3 |
| 11F11 | | 0.8 | 99.2 | 0.0 | 143.3 | 64.0 | 73.3 | 78.0 | |
| 5F8 | | 2.3 | 97.7 | 0.0 | 143.8 | 59.0 | 68.7 | 82.7 | |
| 4C3 | | 0.9 | 94.4 | 4.5 | 142.7 | 60.0 | 66.9 | 71.2 | 82.7 |
| 11A6 | | 4.8 | 94.0 | 0.0 | 143.2 | 61.0 | 66.0 | 71.4 | 82.1 |
| 10D2 | | 1.1 | 98.8 | 0.0 | 141.4 | 61.0 | 67.7 | 77.1 | |
| 24H2 | | 0.0 | 100.0 | 0.0 | 142.4 | 62.0 | 71.7 | 76.9 | 79.8 |
| 4D4 | | 3.2 | 96.8 | 0.0 | 144.2 | 62.0 | 71.7 | 77.0 | 79.9 |
| CD73.4 | IgG1.1f | | 98.2 | 1.8 | 140.4 | 59 | 65.5 | 81.2 | |
| CD73.4 | IgG2-C219S | | | | | 60 | 72.9 | 77.5 | |
| CD73.4 | IgG2-C219S- | 0.4 | 99.6 | | 141.5 | 59 | 68.4 | 78.3 | |
| | IgG1.1f | | | | | | | | |
| CD73.10 | IgG1.1f | 0.4 | 99.6 | | 135.9 | 55 | 64.2 | 78.2 | |
| CD73.10 | IgG2-C219S | | 100 | | 152 | 61 | 73.2 | 77.0 | |
| CD73.10 | IgG2-C219S- | | 100 | | 139.5 | 61 | 70.4 | 76.5 | 84.1 |
| | IgG1.1f | | | | | | | | |
| CD73.3 | IgG1.1f | 0.6 | 99.4 | | 146.1 | 56 | 64.8 | 75.0 | 83.4 |
| CD73.11 | IgG2-C219S | | | | | 61 | 73.4 | 77.9 | |
| CD73.6 | IgG1.1f | 0.2 | 99.7 | 0.0 | 142.0 | 58 | 64.2 | 79.7 | |
| CD73.6 | IgG2-C219S- | 0.3 | 99.7 | 0.1 | 142.3 | 60 | 70.1 | 77.4 | 84.6 |
| | IgG1.1f | | | | | | | | |

The results show that all antibodies are mostly monomeric and are stable.

[0814] The immunogenicity of CD73.4-IgG2C219S.IgG1.1f was tested in an in vitro immunogenicity assay using donor blood. The results indicate low predicted immunogenicity.

### Example 5: Inhibition of Enzymatic Activity by Anti-CD73 Abs

### A. Inhibition of Bead-Bound CD73 Enzymatic Activity

[0815] To assess bead-bound CD73 enzyme activity inhibition by anti-CD73 antibodies, the following materials and methods were used:

### Materials

[0816] TM buffer: 25 mM Tris, 5 mM MgCl₂ in water
0.5 mM Sodium Phosphate buffer, pH8.0
Wash buffer (10 mL 0.5 mM Sodium phosphate, pH8.0; 10 mL 5M NaCl; 34 mL water; 10 uL Tween-20)
Adenosine 5′-monophosphate disodium salt, Sigma Cat#01930-% G, 300 mM in TM buffer
Adenosine 5′-triphosphate disodium salt hydrate, Sigma Cat#A6419-1G, 100 mM in TM buffer
rhCD73, 0.781 mg/mL
cyno CD73, Sino Biological Inc Cat#90192-C08H
Magnet his-tag beads, Invitrogen Cat#10103D

### CellTiter-Glo® Luminescent Cell Viability Assay, Promega Cat#G7572

[0817] mAbO, an unrelated antibody that does not bind CD73

### Methods

[0818] A 6-point serial dilution of the anti-CD73 antibodies listed in Table 16 (max concentration 10 ug/mL) was conducted by combining volumes as dictated in Table 16, and diluting 3-fold (transferring 225 uL into 450 uL TM buffer). All antibodies with an IgG2 hinge contained the C219S mutation.

TABLE 16

| | | | Vol | Vol |
|---|---|---|---|---|
| | [Stock] | [Stim] | Ab | TM |
| Clone | (mg/mL) | (mg/mL) | (uL) | (uL) |
| mAbO | 5.38 | 0.010 | 1.25 | 673.7 |
| F3713.11F11.F3.A4 | 3.70 | 0.010 | 1.82 | 673.2 |
| mAb-CD73.10-Vh-hHC-IgG1.1f | 1.3 | 0.010 | 5.19 | 669.8 |
| mAb-CD73.10-Vh-hHC-IgG2 | 1 | 0.010 | 6.75 | 668.3 |
| mAb-CD73.10-Vh-hHC-IgG2-IgG1.1f | 1 | 0.010 | 6.75 | 668.3 |
| mAb-CD73.4-Vh-hHC-IgG2 | 2.3 | 0.010 | 2.93 | 672.1 |
| mAb-CD73.4-Vh-hHCIgG2-IgG1.1f | 2 | 0.010 | 3.38 | 671.6 |
| mAb-CD73.4-Vh-IgG1.1f | 2.3 | 0.010 | 2.93 | 672.1 |

[0819] Magnet beads (2 ul beads per sample) were washed in 1 mL Sodium phosphate buffer in a microcentrifuge tube. The beads were pulled down with the magnet and resuspended in 400 uL TM buffer. For each species of CD73: In a separate tube, CD73 (75 ng per sample) was combined with TM to bring the volume up to 400 uL. A third tube was prepared for blank beads (no CD73). The bead suspension was combined with rhCD73 solution and mixed on a shaker for 5 min at room temperature. The beads were pulled down with a magnet and the beads were washed in 1 mL wash buffer. The beads were pulled down with a magnet and resuspended in TM buffer (40 uL per sample). The beads were transferred to PCR 96-well plates (40 uL per well). 200 uL per well of serially diluted CD73 HuMab were added to plates and mixed well. The plates were incubated for 30 min at room temperature. 700 uL each of 400 uM ATP (8×) and 1.2 mM AMP (8×) were prepared. 650 uL of each were combined to make a 4×AMP/ATP stock mix. The beads were pulled down and washed twice with 200 uL TM buffer per well. The beads were pulled down again and resuspended in 30 uL TM buffer. The 30 uL beads were transferred to 96 well black plates. 10 uL of the 4x stock solution of AMP/ATP (final concentration 150 uM AMP/50 uM ATP) was added and mixed. Control wells (final concentration 150 uM AMP and/or 50 uM ATP) in 40 uL volume were added. The plates were incubated for 15 min at 37° C.

[0820] The results are shown in FIGS. 21A1, 21A2, 21B1, and 21B2, and Table 17.

TABLE 17

| mAB | Fc | EC50 (nM) |
|---|---|---|
| 11F11 | IgG2 | 3.98 |
| 4C3 | IgG1 | 3.63 |
| 4D4 | IgG2 | 5.31 |
| 10D2 | IgG1 | 6.94 |
| 11A6 | IgG1 | 3.12 |
| 24H2 | IgG1 | 4.18 |
| 5F8 | IgG1 | 5.76 |
| 6E11 | IgG1 | 3.71 |
| 7A11 | IgG1 | 2.86 |
| CD73.4 | IgG1.1f | 3.25 |
| CD73.4 | IgG2-C219S | 2.72 |
| CD73.4 | IgG2-C219S-IgG1.1f | 2.97 |
| CD73.10 | IgG1.1f | 4.69 |
| CD73.10 | IgG2-C219S | 7.54 |
| CD73.10 | IgG2-C219S-IgG1.1f | 4.84 |

[0821] The results of enzymatic inhibition of cyno CD73 are set forth in Table 18.

TABLE 18

| mAB | Fc | EC50 (nM) |
|---|---|---|
| CD73.4 | IgG1.1f | 7.123 |
| CD73.4 | IgG2-C219S | 3.658 |
| CD73.4 | IgG2-C219S-IgG1.1f | 4.572 |
| CD73.10 | IgG1.1f | 10.2 |
| CD73.10 | IgG2-C219S | 8.783 |
| CD73.10 | IgG2-C219S-IgG1.1f | 9.935 |

[0822] The results show that the antibodies dose dependently inhibit the enzymatic activity of human CD73. CD73.4.IgG2-C219S-IgG1.1f has an EC50 of 2.97 (range 2.9 to 3.1 nM) in the recombinant human CD73 enzyme inhibition assay. CD73.4.IgG2-C219S-IgG1.1f has an EC50 of 3.7 (range 1.6 to 12.6 nM) in the recombinant cyno CD73 enzyme inhibition assay. Thus, all antibodies to CD73 tested inhibit bead bound human and cyno CD73 enzymatic activity.

### B. Inhibition of CD73 Enzymatic Activity in Calu6 Cells

[0823] This example describes the assessment of Calu6 (CD73 positive) and DMS-114 (CD73 negative) cells for CD73 dephosphorylation of AMP after treatment with anti-CD73 antibodies.

### Materials:

[0824] CD73 antibodies; see table below
MabO control antibody, 5.38 mg/mL
TM buffer: 25 mM Tris, 5 mM MgCl₂ in water
Adenosine 5′-monophosphate disodium salt, Sigma Cat#01930-5G, 300 mM in TM buffer
Adenosine 5′-triphosphate disodium salt hydrate, Sigma Cat#A6419-1G, 100 mM in TM buffer
rhCD73, 0.781 mg/mL

### CellTiter-Glo® Luminescent Cell Viability Assay, Promega Cat#G7572

### Methods:

[0825] The antibodies were serially diluted by combining volumes of purified antibodies and PBS as dictated by Table 19 below in a U-bottom 96-well plate. 6-point serial dilutions with the antibodies (max concentration 25 ug/mL, 300 uL), and 5-fold dilutions, transferring 60 uL into 240 uL PBS, were performed. All antibodies with an IgG2 hinge contained the C219S mutation.

TABLE 19

| | Conc | Vol Ab | Vol PBS |
|---|---|---|---|
| Clone | (mg/mL) | (uL) | (uL) |
| mAbO | 5.38 | 1.39 | 298.6 |
| F3713.11F11.F3.A4 | 3.70 | 2.03 | 298.0 |
| mAb-CD73.10-Vh-hHC-IgG1.1f | 1.3 | 5.77 | 294.2 |
| mAb-CD73.10-Vh-hHC-IgG2 | 1 | 7.50 | 292.5 |
| mAb-CD73.10-Vh-hHC-IgG2-IgG1.1f | 1 | 7.50 | 292.5 |
| mAb-CD73.4-Vh-hHC-IgG2 | 2.3 | 3.26 | 296.7 |
| mAb-CD73.4-Vh-hHC-IgG2-IgG1.1f | 2 | 3.75 | 296.3 |
| mAb-CD73.4-Vh-hHC-IgG1.1f | 2.3 | 3.26 | 296.7 |

[0826] Cells were harvested with Versene and counted. Plates were seeded, spun down at 1500 rpm for 5 min, and resuspended in 100 uL serially diluted antibody. All other wells were resuspended in 100 uL PBS. Incubation was at 37° C. for 20 min. A 15 mL 180 uM stock of AMP was prepared in TM buffer.

[0827] Plates were spun down at 1500 rpm for 5 min and washed once with 200 uL PBS/well. Plates were spun down again and resuspended in 100 uL AMP. All other wells were resuspended in 100 uL TM buffer. The cells were incubated with AMP for 60 min at 37° C. A 7.5 mL 60 uM stock of ATP in TM buffer was prepared. Plates were spun down at 1500 rpm for 5 min and 50 uL of the supernatant was transferred to a black 96-well plate. 50 uL of ATP was added. rhCD73 was added to certain wells at 75 ng per well as a positive control. Wells that did not receive rhCD73 were brought up to 100 uL with TM buffer. Final concentration was 90 uM AMP: 30 uM ATP. Incubation was at 37° C. for 15 min. For the CellTiterGlo Assay (which detects ATP), 100 uL were added per well and the plate was read.

[0828] The results, which are shown in FIGS. 22A1, 22A2, 22B1, 22B2, and Table 20, indicate that the anti-CD73 antibodies inhibit dephosphorylation of AMP (or reduce AMP processing) in the human CD73 positive Calu6 cells, but have no effect in CD73 negative DMS114 cells. The EC50 for blockade of endogenous cellular CD73 in the human tumor cell line Calu6 of CD73.4-IgG2S-IgG1.1f antibody is 0.39 nM (range 0.31 to 0.48 nM). These experiments were repeated in NCI-H292 (mucoepidermoid carcinoma cell line) and SK-MEL-24 (human melanoma cell line) cells and the results were similar (Table 20).

TABLE 20

| | EC50 | | | EC50 | |
|---|---|---|---|---|---|
| | binding | EC50 enz. | EC50 Calu6 | SKMEL24 | EC50 H292 |
| | Calu6¹ | inhibition² | inhibition³ | inhibition³ | inhibition³ |
| Antibody | (nM) | (nM) | (nM) | (nM) | (nM) |
| 11F11 | 0.78 | 3.980 | 0.70 | 3.15 | 0.81 |
| 4C3 | 2.00 | 3.63 | 3.43 | 13.29 | 4.48 |
| 4D4 | 0.82 | 5.31 | | | |
| 11A6 | 1.93 | 3.12 | 2.21 | | |
| 5F8 | 11.65 | 5.76 | 8.10 | 110.19 | 13.46 |
| 7A11 | 0.35 | 2.86 | 0.95 | 3.72 | 1.31 |
| 24H2 | | 4.18 | | | |
| 10D2 | | 6.94 | | | |
| 6E11 | 0.63 | 3.71 | 1.54 | 3.43 | 1.34 |
| CD73.4-IgG2CS | 0.49 | 2.72 | 0.34 | | |
| CD73.4-IgG1.1f | 0.43 | 3.25 | 0.37 | | |
| CD73.4-IgG2S-IgG1.1f | 0.53 | 2.97 | 0.39 | | |
| CD73.10-IgG2S- | 0.85 | 4.84 | 0.77 | | |
| IgG1.1f | | | | | |
| CD73.10-IgG1.1f | 0.64 | 4.69 | 0.77 | | |
| CD73.10-IgG2S | 0.85 | 7.54 | 0.84 | | |

¹Binding titration on Calu6 cells with endogenous CD73 expression. Antibodies were tested in 2-6 independent experiments, and the average value is indicated.
²Data from section A of this Example. Antibodies were tested in 1-5 independent experiments, and the average value is indicated.
³Inhibition of cellular CD73 activity in indicated cell line. Antibodies were tested in 2-4 independent experiments, and the average value is indicated.

C. Inhibition of CD73 Enzymatic Activity in a Dual Cell Line cAMP Assay
Homogenous Time Resolved Fluorescence (HTRF) cAMP assay

[0829] CD73 antibodies were serial diluted with PBS buffer containing 0.2% BSA, and plated 5 μl/well in 384 well white bottom proxiplate (PerkinElmer, Waltham, Mass.). Calu-6 cells were harvested and resuspend in PBS containing 0.2% BSA, then 5 μl of cells (300 cells/well) were added to the plate. The cells were incubated with antibodies for 10 minutes at 37° C. 5% CO₂ and 95% humidity, followed by the addition of 5 μl/well 80 mM AMP. The cells were further incubated with AMP for 30 minutes at 37° C. During this time, HEK293/A2AR cells were harvested and diluted to 0.4 million/ml in PBS containing 0.2% BSA. They were added into the assay plate at 5 μl/well and continued to incubate at 37° C. for 1 hr. HRTF assays were performed using the homogenous time-resolved fluorescence (HTRE) HiRange cAMP detection kit (Cisbio, Bedford, Mass.) by adding 10 cAMP-conjugated d2 and 10 europium conjugated anti-cAMP antibody in lysis buffer according to the manufacturer's instructions. Plates were incubated at room temperature for 60 minutes and Fluorescence Resonance Energy Transfer (FRET) signals (665 and 615 nM) were read using an EnVision plate reader (PerkinElmer, Waltham, Mass.). The FRET signal was calculated as the ratio of signal from the 665 nm (acceptor) and 615 nm (donor) channels and multiplied by 10,000. IC₅₀ and Ymax were measured. Ymax was determined by comparing to 100 nM dose of 11F11 as internal maximum. All calculations were determined as a percentage of inhibition compared to this control, which was set to 100%.

[0830] The results, which are shown in Table 21, indicate that the anti-CD73 mAbs demonstrated different efficacies and potencies in this cAMP assay using a cell line co-culture system. All Abs showed some reduction in adenosine production, and the extent of inhibition was similar for most Abs screened. The greatest inhibition was seen for 11F11, 11A6, 4C3 and 5F8.

TABLE 21

| Substance | IC50 (nM) | Ymax |
|---|---|---|
| APCP | 1.29 | 97 |
| 11A6 | 4.87 | 84 |
| 5F8 | 13.17 | 80 |
| 4C3 | 9.02 | 80 |
| 11F11 | 0.75 | 76 |
| 7A11 | 0.95 | 45 |

[0831] Enzymatic inhibition assays were also conducted with 11F11 Fab and F(ab′)2. The results, which are shown in FIG. 22C, indicated that enzymatic inhibition occurred with the F(ab′)2 fragment, but not with the Fab fragment. Thus, the Fc region is not required for 11F11 enzymatic inhibition, but bivalency is required.

[0832] Enzymatic inhibition in Calu6 cells was also determined for CD73.4 antibodies comprising various heavy chain constant regions, which are shown in Table 26, using the cAMP assay described above. The results, in terms of EC50 and level of inhibition versus background (“S:B”) are provided in the last two columns of Table 28. The results indicate that all CD73.4 antibodies inhibit human CD73 enzymatic activity in Calu6 cells.

### D. Time Course of CD73 Enzymatic Activity Inhibition

[0833] Inhibition of enzyme activity was also evaluated in a time course by evaluating adenosine generation by LC/MS/MS. Calu6 cells were incubated with 11F11 or 4C3 for 30 minutes, 2 hours or 4 hours, followed by addition of 50 μM AMP and evaluation of adenosine production by LC/MS/MS using standard methods.

$$\frac{Mass Spectrometry Conditions ( Xevo TQ \text{-} S ) \text{:}}{Instrument \text{:} Xevo TQ \text{-} S ( with Waters 2777 C )}$$

Tune = CD73_adenosine_MRM_tune2.ipr

| | |
|---|---|
| Ionization: (+) ESI | Desolvation Temp (° C.): 500 |
| Capillary (kV): 0.9 | Desolvation Gas (L/Hr): 1000 |
| Cone (V): see below | Cone Gas (L/Hr): 150 |
| Source Offset V): 50 | Nebuliser (Bar): 7.0 |
| LM Resolution 1: 2.81 | HM Resolution 1: 15.00 |
| LM Resolution 2: 2.93 | HM Resolution 2: 15.00 |
| Ion Energy 1: 0.4 | Ion Energy 2: 0.9 |
| Collision Gas Flow (mL/min): 0.15 | Collision: see below |

Sample diverted to waste for first 0.5 min

| | |
|---|---|
| Waters Xevo TQ-S | Serial number: WAA021 |

[0834] The results, which are shown in FIG. 22D, indicate that incubation time does make a difference at the 30 min time point and that inhibition by 11F11 occurs faster than that by 4C3. Though both antibodies achieved equal inhibition at later timepoints, the 11F11 antibody more rapidly inhibits CD73 enzymatic activity in cells.

### Example 6: Antibody Mediated Internalization of CD73

[0835] The anti-CD73 antibody mediated internalization of CD73 was measured in two different assays.

[0836] A. High-Content Internalization Assay (2 Hour Fixed Time Assay)

[0837] The anti-CD73 antibodies were used to test anti-CD73 antibody dependent CD73 internalization in Calu6 cells by assessing cellular expression after 2 hours of antibody incubation. Cells (2,000 cells/well) in 20 μl of complete medium (Gibco RPMI Media 1640 with (0% heat inactivated fetal bovine serum) were plated in 384 BD Falcon plate and grown overnight at 37° C. 5% CO₂ and 95% humidity. Anti-CD73 antibodies were serially diluted with PBS buffer containing 0.2% BSA, and added at 5 μl/well into the cell plate. The cells were incubated with antibodies for 2 hours at 37° C. 5% CO₂ and 95% humidity, followed by washing once with PBS buffer. Formaldehyde (final 4% in PBS) was then added into cell plate at 20 ul/well, and the plate was incubated at room temperature for 10 minutes. Afterwards, all liquid was aspirated and cells were washed once with 30 ul PBS. Detection antibody (2.5 μg/well of anti-CD73 Ab CD73.10.IgG2C219S) was added at 15 μg/well into the fixed cell plate. The cells were incubated at 4° C. overnight. On the next day, the plate was washed twice with PBS buffer, followed by adding secondary antibody containing Alexa-488 goat anti human and DAPI, stained for 1 hour at room temperature. After 3 washes in PBS buffer, the plate was imaged on Arrayscan Vti (Cellomics, Pittsburgh, Pa.). IC₅₀ and Ymax were measured. Ymax was determined by comparing to 100 nM dose of 11F11 as internal maximum. All calculations were determined as a percentage of internalization compared to this control, which was set to 100%.

[0838] The results are provided in Table 22.

TABLE 22

| mAb | Constant region | Epitope bin | EC50 (nM) | Ymax |
|---|---|---|---|---|
| 11F11 | IgG2 | 1 | 0.58 | 98 |
| 4C3 | IgG1 | 2 | ND | NA |
| 4D4 | IgG2 | 1 | 0.38 | 104 |
| 10D2 | IgG1 | 1 | ND | 29 |
| 11A6 | IgG1 | 1 | ND | NA |
| 24H2 | IgG1 | 1 | 8.2 | 51 |
| 5F8 | IgG1 | 2 | ND | NA |
| 6E11 | IgG1 | 1 | ND | NA |
| 7A11 | IgG1 | 1 | 2.59 | 50 |
| CD73.4 | IgG2-C219S-IgG1.1f | 1 | 1.2 | 97 |
| CD73.10 | IgG1.1f | 1 | 6.18 | 64 |
| CD73.10 | IgG2-C219S | 1 | 0.67 | 99 |
| CD73.10 | IgG2-C219S-IgG1.1f | 1 | 0.87 | 99 |

ND = Not Detected
NA = Not Applicable

[0839] Thus, the results indicate that the EC50 of CD73 internalization mediated by CD73.4.IG2-C219S-IgG1.1f in the human CD73 expressing cell line Calu6 was 1.2 nM, and that the maximal level of internalization in the cell line was 97.5%.

[0840] Internalization assays were also conducted with 11F11 Fab and F(ab′)2. The results, which are shown in FIG. 22C, indicate that internalization occurred with the F(ab′)2 fragment, but not with the Fab fragment. Thus, the Fc region is not required for 11F11 internalization.

[0841] Kinetic internalization studies were performed to assess the rate of internalization. Cells (2,000 cells/well) in 20 μl of complete medium (Gibco RPM Media 1640 with 10% heat inactivated fetal bovine serum) were plated in 384 BD Falcon plate and grown overnight at 37° C. 5% CO₂ and 95% humidity. CD73 antibodies were diluted with PBS buffer containing 0.2% BSA to 10 μg/ml and added 5 μl/well into the cell plate. The cells were incubated with antibodies for a 0-2 hour time course at 37° C., followed by washing once with PBS buffer. The cells were subsequently fixed with formaldehyde (final 4% in PBS) at room temperature for 10 minutes, and then washed once with 30 ul PBS. Detection antibody (2.5 μg/well anti-CD73 Abs CD73.10.IG2C219S) were diluted with PBS buffer containing 0.2% BSA, and added 15 μl/well into the fixed cell plate. The plate was incubated at 4° C. for overnight. On the next day, after 3 washes in PBS buffer, Secondary antibody Alexa488-goat anti human with DAN were added. The cells were stained for 60 minutes at room temperature, after 3 washes, images were acquired using Arrayscan (Cellomics, Pittsburgh, Pa.). The results are provided in FIGS. 23A-23D and Tables 23 and 24. The values in Table 24 derive from the data shown in FIGS. 23A-D.

TABLE 23

| | | | | CD73.10.IgG1.1f |
|---|---|---|---|---|
| | | 11F11(IgG2) T_{1/2} | 6E11 1T_{1/2} | T_{1/2} |
| Cell line | Cell type | (min) | (min) | (min) |
| Calu6 | Human pulmonary | 3.9 | 60.9 | 14.4 |
| | adenocarcinoma | | | |
| HCC44 | Non-small cell lung | 3.3 | 27.9 | 23.5 |
| | carcinoma | | | |
| H2030 | Non-small cell lung | 3.3 | 40.3 | 18.3 |
| | carcinoma | | | |
| H647 | Non-small cell lung | 45.7 | N/A | N/A |
| | carcinoma | | | |
| H2228 | Non-small cell lung | 10.9 | 36.5 | 35.7 |
| | carcinoma | | | |
| HCC15 | Non-small cell lung | 2.2 | 84.4 | 37.9 |
| | carcinoma | | | |
| SKLU1 | Lung adenocarcinoma | 6.8 | 18.0 | 17.2 |
| SKMES1 | Melanoma | 2.2 | 62.8 | 32.3 |
| SW900 | Squamous cell lung | 10.3 | 94.9 | 43.4 |
| | carcinoma | | | |

TABLE 24
T_{1/2} and % internalization of CD73 antibodies in 4 human cell lines

| | H228 cells | | HCC15 cells | | Calu6 cells | | H2030 cells | |
|---|---|---|---|---|---|---|---|---|
| | T_{1/2} | % | T_{1/2} | % | T_{1/2} | % | T_{1/2} | % |
| | min | internalization | min | internalization | min | internalization | min | internalization |
| CD73.11-IgG2CS | — | — | — | — | 4.1 | 89 | 4.6 | 85 |
| CD73.10-IgG2CS | 9.7 | 93 | 2.6 | 91 | 3.0 | 91 | 3.3 | 85 |
| CD73.10-IgG2CS- | 9.4 | 92 | 3.0 | 91 | 3.1 | 91 | 4.3 | 87 |
| IgG1.1f | | | | | | | | |
| CD73.4-IgG2CS | 13.8 | 94 | 3.1 | 94 | 6.5 | 88 | 3.7 | 89 |
| CD73.10-IgG1.1f | 35.7 | 33 | 37.9 | 71 | 14.4 | 63 | 18.3 | 67 |
| CD73.3-IgG1.1f | 16.5 | −47 | >240 | 38 | 111.4 | 79 | >120 | 27 |
| 11F11 | 10.9 | 96 | 2.2 | 94 | 3.9 | 87 | 3.3 | 90 |
| 4C3 | 7.6 | −48 | 141.5 | 28 | 0.6 | −6 | >120 | −34 |
| 6E11 | 36.5 | 13 | 84.4 | 64 | 107.4 | 68 | 40.32 | 51 |

[0842] The results indicate that the bin 1 antibodies (11F11 and its derivatives CD73.4 and CD73.10) showed good internalization EC₅₀ and maximal values (97.5%), although some antibodies were more internalized than others. 11F11 was the most active and internalized within minutes, reaching a plateau in 30 minutes, whereas 6E11 (also a bin 1 antibody, IgG1) internalized more slowly, reaching a plateau at about 1 hr (FIGS. 23A-D). The bin 2 antibodies (5F8 and 4C3) did not internalize significantly. In addition, the presence of IgG2 hinge and CH1 domain enhanced the speed and extent of internalization. This trend was observed in several cell lines (FIGS. 23A-D and Table 24).

[0843] B. Internalization Measured by Flow Cytometry

[0844] Anti-CD73 antibody mediated internalization of CD73 was also tested by flow cytometry. Indicated cells were incubated with 10 μg/mL of the indicated antibody for 30 minutes on ice, washed several times, and transferred to 37° C. for the indicated time. Cells were harvested at the same time after the indicated incubation time. Cells were stained with primary antibody again (same antibody used for initial incubation) followed by anti-human secondary antibody. Cells were then assayed for expression of CD73 by flow cytometry.

[0845] The results, which are shown in FIG. 23E and Table 25, are consistent with those obtained in the internalization assays described above, and indicate that, all antibodies with IgG2 hinge and CH1 induced rapid and complete internalization. The CD73 levels remained low after 22 hours post wash-out, indicating that internalization is durable.

[0846] Similar results, shown in FIG. 23F and Table 25, were obtained in the NCI-H292 cell line, in which antibody was maintained in culture during the incubation time (no wash-out). Again, these data indicate rapid and significant internalization and maintenance of downregulation of endogenous CD73.

[0847] Internalization assays were also conducted with the human SNU-C1 (colon cancer cell line) and NCI-H1437 (non-small cell lung carcinoma cell line) cells. The results, which are shown in FIGS. 231 and 23J and Table 25, also indicate rapid internalization with a maximal level reached within 5 hours and a maximal level of internalization of about 50% for CD73.4.IgG2-C219S-IgG1.1f in SNU-C1 and 60% for NCI-H1437 cells. FIGS. 23G and 23H show similar kinetics of internalization of CD73.4.IgG2-C219S-IgG1.1f in Calu6 and NCI-H292 cells. For graphs, which show % of CD73 internalized, this number was obtained as follows:

$$\% CD 73 internalized = 100 - ( \frac{{MFI}_{t = x} - {MFI}_{background}}{{MFI}_{t = 0} - {MFI}_{background}} \times 100 )$$

where for each antibody, MFIₜ₌ₓ is the MFI at a given timepoint and MFIₜ₌₀ is maximal fluorescence at t=0, and Mn_{background} is the MFI of the secondary Ab only.

TABLE 25
EC₅₀s of antibody mediated CD73 internalization in several cell lines

| | | | | | | | SNU-C1 | | | | NCI-H1437 | |
|---|---|---|---|---|---|---|---|---|---|---|---|---|
| | Calu6 | | NCI-H292 | | SNU-C1 | | (no wash) | | NCI-H1437 | | (no wash) | |
| | Ymax | T_{1/2} | Ymax | T_{1/2} | Ymax | T_{1/2} | Ymax | T_{1/2} | Ymax | T_{1/2} | Ymax | T_{1/2} |
| | (%) | (hr) | (%) | (hr) | (%) | (hr) | (%) | (hr) | (%) | (hr) | (%) | (hr) |
| mAb- | 76.8 | 0.5661 | 77.64 | 0.2633 | 48.96 | 0.4954 | 38.39 | 1.025 | 63.12 | 0.3164 | 62.78 | 0.3418 |
| CD73.4- | | | | | | | | | | | | |
| IgG2- | | | | | | | | | | | | |
| IgG1.1f | | | | | | | | | | | | |
| mAb- | 75.59 | 0.6003 | 78.42 | 0.2766 | — | — | — | — | — | — | — | — |
| CD73.4- | | | | | | | | | | | | |
| IgG2 | | | | | | | | | | | | |
| mAb- | 44.99 | 1.737 | 51.49 | 0.2087 | 30.58 | 0.9915 | 33.16 | 2.33 | 49.76 | 0.4915 | 49.95 | 0.5384 |
| CD73.4- | | | | | | | | | | | | |
| IgG1.1f | | | | | | | | | | | | |

[0848] Additional internalization assays were conducted in Calu6 and H292 cells to further discriminate the role of isotype on internalization. The internalization assays were conducted as described above (protocol without the wash-out step of the antibodies), and the antibodies of varying hybrid isotypes shown in Table 26 were maintained in culture at 10 μg/mL during the incubation time. For the flow cytometry experiments, the method of Example 6B was adapted to high throughput analysis in 96 well plates (as opposed to 48 well plates) and with 50,000 cells per well.

TABLE 26
Constant regions tested with the variable regions of CD73.4:

| | SEQ ID NO of | |
|---|---|---|
| Constructs | constant region | Description |
| IgG1f | 267 | wild type IgG1f |
| IgG1.1f | 272 | standard inert IgG1.1f |
| IgG2.3 | 268 | IgG2 A-form (C219S) |
| IgG2.5 | 271 | IgG2 B-form (C131S) |
| IgG2.3G1-KH | 270 | CH1, upper hinge and lower hinge/upper CH2 of IgG2.3, |
| | | all else IgG1f |
| IgG2.5G1-KH | 279 | CH1, upper hinge and lower hinge/upper CH2 of IgG2.5, |
| | | all else IgG1f |
| IgG2.3G1-AY | 269 | CH1 and upper hinge of IgG2.3, all else IgG1f |
| IgG2.5G1-AY | 278 | CH1 and upper hinge of IgG2.5, all else IgG1f |
| IgG1-G2.3G1-KH | 282 | CH1 of IgG1, upper hinge and lower hinge/upper CH2 of |
| | | IgG2.3, all else IgG1f |
| IgG1-G2.3G1-AY | 281 | CH1 of IgG1, upper hinge of IgG2.3, all else IgG1f |
| IgG2.3G1.1f-KH | 273 | CH1, upper hinge and lower hinge/upper CH2 of IgG2.3, |
| | | all else IgG1.1f |
| IgG2.5G1.1f-KH | 277 | CH1, upper hinge and lower hinge/upper CH2 of IgG2.5, |
| | | all else IgG1.1f |
| IgG1-deltaTHT | 274 | IgG1 with THT sequence removed from hinge |
| IgG2.3-plusTHT | 275 | IgG2.3 with THT sequence (from IgG1) added into hinge |
| IgG2.5-plusTHT | 280 | IgG2.5 with THT sequence (from IgG1) added into hinge |
| IgG2.3-plusGGG | 276 | IgG2.3 with flexible GGG sequence added into hinge |

[0849] FcγR binding was shown to be as expected for each construct, i.e., FcγR binding is driven by lower hinge/CH2 region.

[0850] The results are shown in FIGS. 23K, L, M and in Table 27 and 28. Data shown in Table 27 were generated using the same protocol described in Example 6B. Data shown in Table 28 were generated using the same protocol described in Example 6A.

TABLE 27
Ymax and T_{1/2} of antibody mediated CD73 internalization
in Calu6 and NCI-292 cells

| | Calu6 | | NCI-H292 | |
|---|---|---|---|---|
| | Ymax | | Ymax | |
| | (%) | T_{1/2} (hr) | (%) | T_{1/2} (hr) |
| mAb-CD73.4-IgG1f/LC- | 55.72 | 0.8452 | 73.05 | 0.5014 |
| 11F11-Vk2 | | | | |
| mAb-CD73.4-IgG2.3G1-AY- | 85.07 | 0.3326 | 90.25 | 0.272 |
| pTT5-SP | | | | |
| mAb-CD73.4-IgG2.3G1-KH | 81.62 | 0.3962 | 91.61 | 0.2801 |
| mAb-CD73.4-G1-G2.3-G1-AY | 72.7 | 0.4229 | 84.51 | 0.3083 |
| mAb-CD73.4-IgG1-deltaTHT | 69.27 | 0.5652 | 83.63 | 0.3441 |
| mAb-CD73.4-G1-G2.3-G1-KH | 65.67 | 0.5674 | 83.29 | 0.343 |
| mAb-CD73.4-IgG2.3-plusTHT | 81.19 | 0.3551 | 91.41 | 0.2935 |
| mAb-CD73.4-IgG2.3- | 81.72 | 0.3355 | 91.6 | 0.2712 |
| plusGGG | | | | |
| mAb-CD73.4-IgG2.5 | 78.98 | 0.3485 | 89.56 | 0.3057 |
| mAb-CD73.4-IgG2.5G1.1f-KH | 79.63 | 0.3527 | 90.86 | 0.2993 |
| mAb-CD73.4-IgG2.5G1-AY | 81.91 | 0.2901 | 91.3 | 0.2452 |
| mAb-CD73.4-IgG2.5G1-KH | 76 | 0.2837 | 90.75 | 0.256 |
| mAb-CD73.4- | 80.15 | 0.2869 | 89.6 | 0.2565 |
| IgG2.5plusTHT/LC | | | | |
| mAb-CD73.4-IgG2-C219S/LC | 82.35 | 0.3725 | 88.91 | 0.2866 |
| mAb-CD73.4-IgG2-C219S/LC | 82.54 | 0.3639 | 87.66 | 0.2845 |
| mAb-CD73.4-IgG1.1f + K/LC | 57.07 | 1.519 | 70.4 | 0.4969 |
| mAb-CD73.4-IgG2CS-IgG1.1f | 80.98 | 0.3508 | 90.35 | 0.2764 |

TABLE 28
Internalization and enzyme inhibition characteristics of CD73.4 with various constant
regions in Calu6 cells

| | | Internalization | | CD73 Inhibition | |
|---|---|---|---|---|---|
| # | CD73_mAb_Clones | Max | Speed | EC50 (nM) | S:B |
| 1 | CD73.4-IgG1f/LC-11F11-Vk2 | + | + | 2.01 | 2 |
| 2 | CD73.4-Vh-hHC-IgG2.3G1-AY-pTT5-SP5 | ++++ | ++++ | 2.37 | 56 |
| 3 | CD73.4-Vh-hHC-IgG2.3G1-KH | ++++ | +++ | 1.70 | 52 |
| 4 | CD73.4-Vh-hHC-G1-G2.3-G1-AY | ++ | ++ | 0.38 | 6 |
| 5 | CD73.4-Vh-hHC-G1-G2.3-G1-KH | ++ | ++ | 0.63 | 3 |
| 6 | CD73.4-Vh-hHC-IgG1-deltaTHT | ++ | +++ | 0.31 | 6 |
| 7 | CD73.4-Vh-hHC-IgG2.3-plusTHT | ++++ | ++++ | 1.54 | 33 |
| 8 | CD73.4-Vh-hHC-IgG2.3-plusGGG | ++++ | ++++ | 1.26 | 26 |
| 9 | CD73.4-Vh-hHC-IgG2.5 | ++++ | ++++ | 2.17 | 51 |
| 10 | CD73.4-Vh-hHC-IgG2.5G1.1f-KH | ++ | ++++ | 0.87 | 45 |
| 11 | CD73.4-Vh-hHC-IgG2.5G1-AY | +++ | ++++ | 0.43 | 92 |
| 12 | CD73.4-Vh-hHC-IgG2.5G1-KH | +++ | ++++ | 0.44 | 42 |
| 13 | CD73.4-Vh-hHC-IgG2.5plusTHT/LC | ++++ | ++++ | 0.90 | 44 |
| 14 | CD73.4-Vh-hHC-IgG2-C219S/LC | ++++ | ++++ | 1.56 | 28 |
| 15 | CD73.4-Vh-hHC-IgG2-C219S/LC | ++++ | ++++ | 1.78 | 41 |
| 16 | CD73.4-Vh-hHC-IgG1.1f+K/LC | + | + | 0.70 | 2 |
| 17 | CD73.4-Vh-hHC-IgG2C219S-IgG1.1f | ++++ | ++++ | 1.28 | 12 |

[0851] FIGS. 23K, L and M and Tables 27 and 28 indicate that antibodies having a hinge and CH1 domain of the IgG2 isotype are most efficient at driving internalization of CD73, whereas the antibodies that have an IgG1 hinge and CH1 domain correspond to the lower curves in the figure, i.e., lower extent of internalization. In addition, antibodies with only the hinge from IgG2 have an increased internalization compared to a human IgG1 hinge. Thus, antibodies having a hinge and CH1 domain of the IgG2 isotype have superior internalization characteristics relative to the antibodies with an IgG1 isotype.

[0852] Thus, anti-CD73 antibody mAb-CD73.4-IgG2CS-IgG1.1f induced rapid internalization dependent on cell line tested. The T½ for internalization ranged from minutes to under an hour. Most cell lines tested had a T½ under 10 minutes. A nearly complete internalization was induced for some cell lines and all tested had at least a 50% reduction in surface CD73 expression which typically reached maximal levels by 5 hours, much shorter in some cases.

[0853] The SEC-MALS and DLS data demonstrate that larger complexes are formed between hCD73-his and mAbs containing an IgG2 hinge and CH1 region (IgG2-C219S or IgG2-C219S-IgG1.1f), compared to those containing the IgG1 hinge and CH1 region (IgG1.1f).

### Example 7: CD73 Enzymatic Inhibition in Tumors in Xenograft Animal Models

[0854] A. In Situ Inhibition of CD73 Enzymatic Activity of Anti-CD73 Antibodies in Calu-6 Xenograft Model

[0855] Mice bearing subcutaneous human Calu6 tumors were treated with CD73.10-IgG1.1, CD73.10-IgG2CS, or CD73.10-IgG2CS-IgG1.1 after 7 days of growth. Antibodies were dosed at 10 mg/kg IP. Tumors were harvested at days 1, 2, 3 and 7 after antibody administration, embedded in OCT and snap frozen in chilled isopentane. OCT embedded tumors were cut in 5-6 μm sections and allowed to dry over night at RT. Tumor sections were fixed for 2.5 min with a 1:1 mixture of cold 10% phosphate-buffered formalin and acetone then preincubated for 1 hour at RT in 50 mM Tris-maleate buffer, pH 7.4 containing 2 mM CaCl2 and 0.25 M sucrose. After 1 hour the preincubation buffer was removed and was replaced with the same buffer supplemented with 5 mM MnCl₂, 2 mM Pb(NO3)2, 2.5 Dextran T200, 2.5 mM levamisole, and 1 mM AMP. The enzymatic reaction was carried out for 1 h at 37° C. After a rinse with DI water, sections were incubated for exactly 1 min with 1% (NH₄)₂S followed by a quick rinse in DI water. Sections were counterstained with haematoxylin, dehydrated and mounted with a xylene based mounting medium. A brown color indicates the presence of active CD73, whereas the lack of brown color indicates that CD73 enzymatic activity was inhibited by the antibody.

[0856] The results indicate that CD73.10-IgG1.1, CD73.10-IgG2CS, and CD73.10-IgG2CS-IgG1.1 inhibit CD73 enzymatic activity in vivo. Representative stained sections of the tumors from mice treated with the CD73.10-IgG2CS-IgG1.1 antibody are shown in FIGS. 24A-24E. The stained sections of tumors from mice treated with the other two antibodies were similar. The extent of inhibition of CD73 correlated with serum levels of antibody. Thus the slightly higher level of CD73 activity observed in the Day 3 example correlated with a lower serum level of antibody than the Day 7 example.

### B. In Situ Inhibition of CD73 Enzymatic Activity by CD73.4-IgG2.CS.IgG1.1f in Calu-6 Xenograft Model

[0857] This experiment assessed the ability of CD73.4-IgG2.C219S.IgG1.1f to suppress the enzymatic activity of CD73 in a Calu-6 xenograft tumor model.

[0858] Mice (Hsd athymic nude Foxnlnu, Harlan, aged 6-8 weeks) implanted with Calu-6 tumors (25-50 mm3). When the implanted tumors reached about 250 mm³, mice were intraperitoneally administered a single dose of CD73.4-IgG2C219S.IgG1.1f at 0.1, 0.3, 1, 3, and 10 mg/kg along with an irrelevant fully human monoclonal antibody (mAb) as control. Tumors were harvested 72 hours later and embedded in optimal cutting temperature (OCT) media.

[0859] OCT-embedded tumors were cut in 5- to 6-μm sections and allowed to dry overnight at room temperature (RT), then stored at −80° C. Tumor sections were thawed, fixed for 2.5 minutes with a 1:1 mixture of cold 10% phosphate-buffered formalin and acetone, then preincubated for 1 hour at RT in 50 mM Tris-maleate buffer, pH 7.4 containing 2 mM CaCl2, and 0.25 M sucrose. After 1 hour, the preincubation buffer was removed and replaced with the same buffer supplemented with 5 mM MnCl2, 2 mM Pb(NO3)2, 2.5% Dextran T200, 2.5 mM levamisole, and 1 mM 5′AMP. The enzymatic reaction was carried out for 1 hour at 37° C. After a rinse with deionized (DI) water, sections were incubated with 1% (NH4)2S for exactly 1 minute, followed by a quick rinse in DI water. Sections were counterstained with hematoxylin, dehydrated, and mounted with a xylene-based mounting medium. Automated image analysis was performed to quantify the enzymatic activity of CD73. All slides were scanned using a Pannoramic MIDI scanner from 3DHISTECH Ltd. Analysis was performed on the entire tumor section (excluding necrotic areas) using the Smart Segmentation algorithm of Image-Pro software. The algorithm was trained over multiple images to detect the brown staining (indicator of enzymatic activity), blue staining (indicator of absence of enzymatic activity), and background. Once the algorithm parameters were set, all slides were analyzed. The application calculates in pixels the area that is stained brown and the area that is blue. GraphPad Prism was used to analyze and graph the data.

[0860] Calu-6 tumors expressed high levels of CD73, as indicated by the intense brown staining associated with the enzymatic activity of CD73. Treatment with CD73.4-IgG2C219S.IgG1.1f at 3 mg/kg and 10 mg/kg suppressed CD73 in a dose-dependent manner. Image analysis of tumor sections indicated that CD73.4-IgG2C219S.IgG1.1f dosed at 3 mg/kg suppressed about 24% of CD73 activity in the tumor while a dose of 10 mg/kg achieved 67% suppression of CD73 activity (Table 29 and FIG. 22E). At doses less than 3 mg/kg, only minimal CD73 inhibition was observed, as indicated by lighter brown staining on the tumor margins; consequently, no image analysis was performed.

TABLE 29
Quantification of In Situ Enzymatic Activity of CD73

| | Control Antibody | | 3 mg/kg | | 10 mg/kg | |
|---|---|---|---|---|---|---|
| | % brown | % blue | % brown | % blue | % brown | % blue |
| Tumor 1 | 93.36 | 6.64 | 79.13 | 20.87 | 60.55 | 39.45 |
| Tumor 2 | 89.85 | 10.15 | 86.05 | 13.95 | 41.04 | 58.96 |
| Tumor 3 | 96.20 | 3.80 | 61.07 | 38.93 | 17.14 | 82.86 |
| Tumor 4 | 95.90 | 4.10 | 82.19 | 17.81 | 12.66 | 87.34 |
| Tumor 5 | 95.14 | 4.86 | 67.50 | 32.50 | | |
| Average | 94.09 +/− 2.6 | 5.91 +/− 2.6 | 75.19 +/− 10.5 | 24.81 +/− 10.5 | 32.85 +/− 22.7 | 67.15 +/− 22.7 |

[0861] Complete inhibition of CD73 activity in Calu-6 tumors was not achieved, even with a saturating dose of 10 mg/kg, due to the presence of mouse stroma that express mouse CD73. CD73.4-IgG2C219S.IgG1.1f does not cross-react with mouse CD73. Therefore, baseline CD73 activity resulting from mouse tissues (eg, stroma, blood vessels) is always present in the xenograft tumor model.

[0862] These results suggest that CD73.4-IgG2C219S.IgG1.1f inhibits enzymatic activity of CD73 in Calu-6 tumors in a dose-dependent manner. However, complete suppression of CD73 activity cannot be achieved due to the presence of normal mouse tissues within the xenograft tumor.

### C. In Situ Inhibition of CD73 Enzymatic Activity by CD73.4-IgG2.CS.IgG1.1f in SNUC1 Xenograft Model

[0863] A similar experiment to that described above was conducted on mice bearing subcutaneous human SNUC1 colon adenocarcinoma-derived xenograft tumors and treated with the anti-CD73 antibody CD73.4IgG2CS-IgG1.1f. Mice with SNUC1 tumors were treated with CD73.4IgG2CS-IgG1.1f at 1, 3 and 10 mg/kg IP on day 0. Tumors were harvested at 24h, 48h, 72h, 96h and 168h after dosing. The CD73 enzymatic inhibition assay was performed as described above. The quantification of brown staining was performed with Image Pro Premier software (Media Cybernetics).

[0864] The results, which are presented in the graph in FIG. 24F, show that CD73 activity is significantly reduced animals dosed with the anti-CD73 antibody when compared with control antibody-treated mice, indicating strong CD73 enzyme inhibition by the antibody at all three concentrations. Thus, the anti-CD73 antibody CD73.4IgG2CS-IgG1.1f efficiently inhibits CD73 enzymatic activity in vivo.

[0865] Automated image analysis using HALO™ software on whole slide images revealed a reduction in enzymatic activity ranging from 70% to 96% in all dosing groups compared with the respective control group except at one timepoint (1 mg/kg at 96 hours) where a 47% reduction was seen. There was no clear dose- or time-course-dependency observed. This could be partially attributed to lack of cross-reactivity of CD73.4IgG2CS-IgG1.1f to mouse CD73 (inability to completely suppress all CD73 enzymatic activity in the xenograft system) and to the effectiveness of suppression at the tested exposure levels.

[0866] The results indicate that CD73.4IgG2CS-IgG1.1f inhibits 70% to 96% of CD73 activity in SNU-C1 tumors.

[0867] The kinetics of CD73 inhibition by the anti-CD73 antibodies was also determined in the 4T1 syngeneic tumor model. TY/23 (rat anti-mouse CD73 antibody) or rat IgG control (10 mg/kg) was injected on day 7 post 4T1 tumor cell injection. Tumor, spleen, whole blood and serum were collected on days 1, 2, 3, 6 and 7 after Ab treatment. Inhibition of CD73 activity was measured as described above in sections from the indicated day. Representative tumor sections are shown in FIGS. 25A and 25B. The data indicate that TY/23 inhibits CD73 activity in vivo.

### D. In Situ Inhibition of CD73 Enzymatic Activity by Anti-Mouse CD73 Antibody in MC38 Tumors

[0868] The level of inhibition of CD73 enzymatic activity in vivo in MC38 tumors at different times after administration of a single dose of 10 mg/kg, 20 mg/kg, or 30 mg/kg of anti-mouse CD73 antibody was also determined.

[0869] Animals with MC38 tumors were dosed with anti-mouse CD73 antibody at 0, 10, 20, or 30 mg/kg, and enzymatic activity was determined in tumors harvested 24, 48, 96, 168, 240, 336, or 504 hours later. The level of enzymatic inhibition was converted into numerical values following image analysis. The results, which are shown in FIG. 24G, indicate enzymatic activity inhibition at all 3 doses of anti-CD73 antibody, and that inhibition lasts for an extended time following antibody administration at all three doses. Treatment with anti-mouse CD73 antibody suppressed CD73 activity for the first 96 hours post dosing for all 3 doses tested (FIG. 24G). A dose-dependent response was observed at later timepoints, with higher doses of antibody showing inhibition of CD73 activity for more than 336 hours, while lower doses showed inhibition of CD73 activity for only 168 hours. Thus, inhibition lasts for an extended time following antibody administration and the level of inhibition of CD73 enzymatic activity correlated with serum levels of antibody.

### Example 8: Epitope Binning and Flow Cytometry Based Cross-Blocking

[0870] Epitope binning studies were performed by Biolayer Interferometry (BLI) using an Octet RED instrument (Pall Fortebio) at 25° C. For these studies, 20-30 ug/ml hCD73-his was captured on anti-penta-his sensors using a 90-180s loading phase. Antibody competition was evaluated by allowing a given antibody (mAb1) to bind to the hCD73-his surfaces for 180s, followed by the immediate exposure to a second antibody solution (mAb2) for 180s. The binding signal for mAb2 after pre-binding of mAb1 was compared to that of mAb2 in the absence of competition, to determine if mAb1 and mAb2 compete for binding to the hCD73-his surfaces. These experiments were performed for numerous mAb pairs in both orders (mAb1 then mAb2 and mAb2 then mAb1) to establish the competition profiles and epitope bins (as summarized in Table 30 below).

[0871] As shown in Table 30, the epitope binning analysis revealed 2 epitope bins.

TABLE 30

| Antibody | Bin 1 | Bin 2 |
|---|---|---|
| 7A11 | X | |
| 6E11 | X | |
| 11F11 | X | |
| 5F8 | | X |
| 4C3 | | X |
| 11A6 | | X |

[0872] The antibodies were also subjected to flow cytometry based cross-blocking. The experiment was conducted as follows using one set of labeled fluorescently labeled antibody and a second set of unlabeled antibody: 100000 NCI-H292 cells were seeded per well. The plate was spun down and the cells were resuspended in 100 uL 2% FBS in PBS per well. The cells were blocked on ice for 20 min. Unlabeled antibody, as indicated, in 2% FBS in PBS was added to each well. The plate was spun down and the cells were resuspended in 100 uL per well of diluted, labeled antibody (10 ug/mL), i.e., either 4C3 or 11F11, conjugated to FITC. 6 wells of cells were incubated without antibody, and were resuspended in 100 uL 2% FBS in PBS only (for controls). The cells were then incubated on ice for 30 min. The cells were washed twice with 2% FBS in PBS and the samples were resuspended in 140 uL 2% FBS in PBS, and analyzed on a FacsCalibur flow cytometer (Becton Dickinson).

[0873] The results of the flow cytometry-based cross-blocking, which are shown in FIGS. 26A and B, confirm the SPR epitope binning data set forth above. For example, 7A11 competes with 11F11, but 4C3 does not.

### Example 9: Epitope Mapping by HDX

[0874] This Example describes the use of HDX-MS for the identification of the epitope on human CD73 to which CD73.4-IgG2CS-IgG1.1f.

[0875] Hydrogen/deuterium exchange mass spectrometry (HDX-MS) method probes protein conformation and conformational dynamics in solution by monitoring the rate and extent of deuterium exchange of protein backbone amide hydrogen atoms (except proline). The exchange level of HDX depends on protein solvent accessibility and hydrogen bonds, and the mass increase of the protein upon HDX can be precisely measured by MS. When this technique is paired with enzymatic digestion, structure features at the peptide level can be resolved, enabling differentiation of surface exposed peptides from those folded inside. In epitope mapping experiments, the deuterium labeling and subsequent quenching experiments are performed in parallel for antigen and antigen/mAb complex, followed by online pepsin digestion, peptide separation, and MS analysis.

[0876] Prior to epitope mapping of CD73.4-IgG2-CS-IgG1.1f in CD73 by HDX-MS, non-deuteriated experiments were performed to generate a list of common peptic peptides for recombinant human full length ECD dimeric CD73 (12 μM) and protein complex of recombinant human CD73 and CD73 mAb (1:1 molar ratio, 12 μM for CD73 mAb), achieving a sequence coverage of 88% for full length ECD CD73. In the HDX-MS experiment, 5 μL of CD73 (SEQ ID NO: 99) or CD73 with CD73.4-IgG2-CS-IgG1.1f mAb was diluted into 55 μL of D₂O buffer (10 mM phosphate buffer, D₂O, pD 7.0) to start the labeling reactions at room temperature. The CD73 protein used was glycosylated full length dimeric hCD73 having SEQ ID NO: 99, also shown below). The reactions were carried out for different periods of time: 20 sec, 1 min, 10 min and 240 min. By the end of each labeling reaction period, the reaction was quenched by adding quenching buffer (100 mM phosphate buffer with 4M GdnCl and 0.4M TCEP, pH 2.5, 1:1, v/v) and 50 μL of quenched sample was injected into Waters HDX-MS system for analysis. The deuterium uptake levels of common peptic peptides were monitored in the absence/presence of CD73 mAb.

[0877] The CD73 protein used had the amino acid sequence having SEQ ID NO: 99.

[0878] HDX-MS measurements on CD73 mAb in CD73 indicate that CD73.4-IgG2-CS-IgG1.1f mAb recognizes a discontinuous epitope comprised of two peptide regions in the N-terminal region of CD73:

(SEQ ID NO: 96)

| | |
|---|---|
| Peptide region 1 (65-83): | FTKVQQIRRAEPNVLLLDA |

(SEQ ID NO: 97)

| | |
|---|---|
| Peptide region 2 (157-172): | LYLPYKVLPVGDEVVG |

[0879] A three-dimensional view of the interaction (FIG. 27B) shows that these two regions are geometrically close. A detailed map of the interaction is shown in FIG. 27A.

### Example 10: Crystal Structure of 11F11 Binding to CD73

[0880] This Example describes the crystal structure of a Fab′ of 11F11 bound to CD73(26-336)His.

[0881] CD73(26-336)His was purified from transiently transfected HEK-293 E cells using standard protocols, and used as such, or was deglycosoylated by PNGase F treatment, and concentrated to 1.2 mg/ml. Antibody 11F11 Fab′ was prepared by Pepsin digestion of 11F11 using standard protocols, and concentrated to 1.1 mg/ml.

[0882] The complex was formed by incubating equal volumes of deglycosylated hCD73(26-336)His and the 11F11 Fab′ overnight at 4° C., purified by using GE Superdex 200 26/60 column, and concentrated to 9.5 mg/ml using a 10 k MWCO spin concentrator.

[0883] The crystals were grown in sitting drops, vapor diffusion experiments and the drop was 0.25 uL protein mixed with 0.25 uL reservoir solution. Over 7100 crystallization experiments were set up. Initial crystal leads were small about 10 μm. Optimized crystals were 200-300 μm in size. Crystallization optimization included screening: additives, detergents, precipitants, pH, temperature, and buffer type. The conditions that allowed crystal formation were as follows: the reservoir solution consisted of 34% Polypropylene Glycol P400, 0.1 M Na/K PO4 pH 6.5, and 15 μM CYMAL-7; crystallization experiments setup at room temperature and then placed at 4° C. to incubate; and incubation at 4° C. for 7 days. Crystal formation was only observed with the glycosylated CD73 protein.

[0884] The crystals were harvested directly from the crystallization drop and placed directly into liquid N2. Over 100 crystals were screened for diffraction in-house.

[0885] Data were collected using a small beam, very little attenuation, and helical data collection on SER-CAT beamline 22ID with the Rayonix MX-33HS high speed CCD detector. Data sets were collected at 4.1 Å, 3.8 Å, 3.5 Å, and finally at 3.05 Å. The data, processed and scaled using routine HKL2000 (Otwinowski Z., Minor W., Methods in Enzymology 276, 307-326 (1997)), was 96% complete to 3.04 Å resolution.

[0886] A BLAST (Altschul et al. (1990) “Basic local alignment search tool.” J. Mol. Biol. 215:403-410) search was used to find the closest model for the CD73 N-terminal domain and the Fc and Fv domains in the RCSB Protein Data Bank to be used in a molecular replacement search: CD73 model was from PDB entry 4H1S (Heuts et al. Chembiochem. 2012 Nov. 5; 13(16):2384-91).

[0887] These were used as the starting model in the PHASER (McCoy et al. J. Appl. Cryst. (2007). 40, 658-674) molecular replacement search. The CD73 search found 5 molecules in the asymmetric unit. Keeping the CD73 fixed, a search with the heavy chain search model found 2 molecules in the asymmetric unit. Keeping the CD73s and heavy chains fixed, a third PHASER search with the light chain also found 2 molecules in the asymmetric unit. A composite model of five complete complexes was made from the partial solutions by overlaying the five CD73s and matching up the heavy and light chains. This was used as the starting model for a BUSTER (Bricogne et al. (2011) BUSTER version 2.11.6. Cambridge, United Kingdom: Global Phasing Ltd) refinement.

[0888] The model has been refitted and the amino acids changed to reflect the 11F11 sequences. The model underwent extensive manual model-building and refinement. A total of five BUSTER refinement cycles were run to complete the refinement. The final R-factor is 20.59% (R-free=24.58%) for the 27,484 protein atoms and 24 solvent molecules.

[0889] Representations of the crystal structure of the complex are set forth in FIGS. 28A-D.

[0890] The crystal structure shows that all but one of the interactions are from residues in the CDR regions, and that most of the interactions are from the VH domain with two additional interactions from the VL domain (FIG. 28A). The interacting residues of human CD73 and 11F11 Fab′ are shown in Table 31.

TABLE 31

| | | 11F11 Heavy Chain | | 11F11 Light Chain | |
|---|---|---|---|---|---|
| CD73 | | | Distance | | Distance |
| Residue | Interaction | Residue | (Å) | Residue | (Å) |
| Phe-65 | VDW | | | Ser-30 | 4.0 |
| | | | | Ser-31 | 3.5 |
| | | | | Trp-32 | 3.8 |
| Gln-69 | VDW | | | Trp-32 | 3.9 |
| Arg-73 | VDW | | | Ser-53 | 3.8 |
| Asn-106 | VDW | Tyr-100 | 3.6 | | |
| Ala-107 | | | | Trp-32 | 3.7 |
| Arg-109 | H-Bond | Pro-100A | 2.8 | Tyr-91 | 3.0 |
| | VDW | Tyr-100 | 3.4 | Trp-32 | 3.5 |
| | | | | Asn-92 | 3.5 |
| Tyr-100 | H-Bond | Tyr-100 | 3.0 | | |
| Lys-136 | VDW | Trp-99 | 3.3 | | |
| | | Tyr-100 | 3.6 | | |
| Phe-137 | VDW | Trp-99 | 3.6 | | |
| | | Tyr-100 | 3.3 | | |
| Pro-138 | VDW | Trp-99 | 3.4 | | |
| Lys-162 | Salt Link | Asp-53 | 2.8 | | |
| | VDW | Tyr-52A | 3.2 | | |
| | | Trp-99 | 3.8 | | |
| Leu-164 | VDW | Tyr-52A | 3.6 | | |
| Pro-165 | VDW | Asn-31 | 3.2 | | |
| | | Tyr-52A | 3.6 | | |
| | | Ser-97 | 3.5 | | |
| Gly-167 | H-Bond | Asn-31 | 2.7 | | |
| | VDW | Tyr-32 | 3.7 | | |
| Asp-168 | H-Bond | Thr-28 | 2.9 | | |
| | VDW | Asn-31 | 3.3 | | |
| | | Phe-27 | 3.4 | | |
| Glu-169 | H-Bond | Asn-31 | 2.9 | | |
| Val-170 | VDW | Asn-31 | 3.5 | | |
| Ser-319 | H-Bond | | | Ser-67 | 2.7 |
| | | | | Gly-68 | 3.0 |
| | VDW | | | Ser-30 | 3.8 |
| | | | | Ser-67 | 3.8 |
| Ile-320 | VDW | | | Ser-30 | 4.0 |

[0891] A model based on the composite structure of two CD73(NDT)/11F11 complexes superimposed on CD73 dimer (PDB Entry 4H1S) suggests that 11F11 binds to the surface on CD73 away from the dimer interface, suggesting that the Fab would not interfere with dimer formation.

[0892] A comparison of HDX-MS mapping and the X-ray results on the CD73/11F11 complex shows that they are in basic agreement showing a similar epitope on CD73 (65-83 and 157-172). However, the X-ray structure shows additional interactions (less than 6A) in the region of Met-105 to Asp-111 (including H-bonds to Arg-109 and Tyr-110), Lys-135 to Pro-139, and Asp-317 to Ile-320 (including H-bonds to Ser-319).

### Example 11: Impact of Different Hinge/Fcs on Size of Antibody/CD73 Complexes

[0893] As shown in the above Examples, anti-CD73 antibodies with an IgG2 hinge and CH1 are better inhibitors of CD73 enzymatic activity on cells and internalize better than the same antibodies with an IgG1 hinge. Based on this observation, and the fact that an IgG2 hinge is stiffer than an IgG1 hinge, it was hypothesized that larger complexes are formed between an antigen and antibodies having an IgG2 hinge relative to antibodies having an IgG1 hinge. The following experiment was conducted to analyze this hypothesis.

[0894] The structure and oligomeric state of CD73/antibody complexes in solution were examined by SEC-MALS and DLS. For these studies, antibodies containing either an IgG1 or IgG2 constant region, were mixed at varying molar ratios with recombinant proteins comprising either the full length extracellular domain of human-CD73 containing a C-terminal polyhistidine tag (amino acid residues 26-546 of human-CD73, termed “hCD73-his”) or a fragment corresponding to the N-terminal domain of human-CD73 (amino acid residues 26-336, termed “N-hCD73-his”).

[0895] The oligomeric state of CD73/antibody complexes were examined by size-exclusion chromatography coupled to an in-line multi-angle light scattering detector (SEC-MALS). Isocratic separations were performed on a Shodex PROTEIN KW-803 column connected to an Prominence Shimadzu UFLC in buffer containing 200 mM K2HPO₄, 150 mM NaCl, pH 6.8, containing 0.02% Na azide (0.1 μm filtered) running at 0.5 mL/min. Samples were injected onto the column using a SIL-20AC Prominence Shimadzu autosampler, and data were obtained from three online detectors connected in series: a Prominence SPD-20AD diode array UV/vis spectrophotometer followed by a Wyatt miniDAWN™ TREOS Multi-Angle Light Scattering Detector then a Wyatt Optilab T-rEX Refractive Index Detector. Data were collected and analyzed using Astra (Wyatt) and Labsolutions (Shimadzu) software.

[0896] Dynamic light scattering (DLS) studies were performed on a Wyatt DynaPro plate reader in 384 well plates at 25° C. Experimental parameters were 20 acquisitions of 5 s each per measurement, and measurements were recorded in quadruplicate, with the average and standard deviation reported. Intensity autocorrelation functions were fitted using the “Regularization” algorithm in the Dynamics software (Wyatt Technologies).

[0897] A summary of the SEC-MALS and DLS is provided in FIGS. 29A and B. Analysis of the antibodies alone, shows retention times (about 16-17 min), masses (140-150 kDa), and hydrodynamic radii (5.0-5.4 nm) for each antibody that are typical for a monomeric monoclonal antibody. The data for the hCD73-his protein is consistent with the protein adopting the expected dimeric structure in solution; in particular, the mass determined from the SEC-MALS data (120 kDa) is consistent with that expected for a CD73-his dimer (117 kDa) and inconsistent with what would be expected for a hCD73-his monomer (58.5 kDa). The data for N-hCD73 is consistent with the recombinant N-domain protein being monomeric in solution (SEC-MALS measured mass=38 kDa, compared to expected monomeric mass=35.0 kDa), which is expected because the region of the full length CD73 extracellular domain that is responsible for dimerization of the protein is contained within the C-terminal domain without contribution of N-domain residues.

[0898] Equimolar mixtures of a given antibody with N-hCD73-his were found to elute as a single species in the SEC with shorter retention time than the antibody or N-hCD73-his alone, as well as larger hydrodynamic radii (Rh) by DLS, which is consistent with the formation of complexes. MALS data indicate masses for these complexes of approximately 210 kDa. This is consistent with one N-hCD73-his molecule bound to each of the two Fab domains of a given antibody to form a 1:2 antibody:N-hCD73-his complex.

[0899] SEC-MALS data for mixtures of anti-CD73 antibodies with hCD73-his dimer shows that the mixture elutes earlier than either the hCD73-his or antibody alone, suggesting that complexes are formed. Comparing the data for mAbs that contain the same variable region but different constant domains, shows that the elution times for the complexes of hCD73-his with mAbs containing a IgG2 constant domains (IgG2-C219S, IgG2-C219S-IgG1.1f) are earlier than those for complexes of hCD73-his with mAbs containing an IgG1.1f constant domain. In addition, the MALS-determined masses for complexes of hCD73-his with mAbs containing an IgG2 constant domain are larger than those for complexes of hCD73-his with mAbs containing an IgG1 constant domain. DLS data further shows that the hydrodynamic radius of complexes of hCD73-his with mAbs containing a IgG2 constant domain are larger than those for complexes of hCD73-his with mAbs containing an IgG1 constant domain. For example, the SEC-MALS and DLS data for CD73.4 with three different constant regions (IgG2-C219S, IgG2-C219S-IgG1.1f, or IgG1.1f) is shown in FIG. 30. Here it can be seen that the complex of hCD73-his with CD73.4 containing the IgG2 constant domain have shorter retention times (FIG. 30A), larger hydrodynamic radii (FIG. 30B) and larger MALS-determined masses (FIG. 30C), as compared to the complexes of hCD73-his with CD73.4-IgG1.1f. Based on the MALS masses, a schematic model for the structure and stoichiometry of the complexes between hCD73-his and the antibodies is shown in FIG. 30D, where complexes containing CD73.4-IgG1.1f predominantly form smaller 2:2 (peak 1=˜550 kDa) or 4:4 mAb/CD73 dimer complexes (peak 2=˜1300 kDa), whereas CD73.4-IgG2-C219S or CD73.4-IgG2-C219S-IgG1.1f form much larger complexes (>3000 kDa) with hCD73-his, for which precise structure and stoichiometry cannot be confidently modeled.

[0900] CD73.4 antibodies having the heavy chain constant regions set forth in Table 27 were also tested for size of complex formation. As shown in FIG. 30D, the results indicate that higher order complexes are formed with antibodies having an IgG2 CH1 domain relative to those having an IgG1 CH1 domain.

[0901] Collectively the SEC-MALS and DLS data demonstrate that larger complexes are formed between hCD73-his and mAbs containing an IgG2 hinge and CH1 region (IgG2-C219S or IgG2-C219S-IgG1.1f), compared to those containing the IgG1 hinge and CH1 region (IgG1.1f). In addition, antibodies having an IgG2 CH1 domain form larger complexes that those having an IgG1 CH1 domain.

[0902] Electron microscopy analyses confirmed the formation of smaller complexes with antibodies having an IgG1 hinge, versus larger, string-like, complexes formed with antibodies having an IgG2 hinge (see Example 25 and FIG. 52).

### Example 12: Relevance of Certain Amino Acid Residues in IgG2 CHI and Hinge in Improving Antibody Mediated CD73 Internalization

[0903] Anti-CD73 antibodies (CD73.4) with the heavy chain constant regions shown in Table 32 were prepared and tested as described above in antibody mediated CD73 internalization assays.

TABLE 32
Heavy chain constant regions that were fused to anti-CD73 variable regions

| | | SEQ ID NO |
|---|---|---|
| Description | Constructs | of constant region |
| CH1 domain of IgG2, with all else IgG1. | G2-G1-G1-G1 | 300 |
| Also, Cys > Ser mutant to reduce potential disulfide | G2.5-G1-G1-G1 | 301 |
| heterogeneity: | | |
| CH1 domain of IgG1 with all else IgG2.3: | G1-G2.3-G2-G2 | 302 |
| Swap CH1 regions in IgG1 with those of IgG2, either | G1-KRGEGSSNLF | 303 |
| separate or together | G1-KRGEGS | 304 |
| | G1-SNLF | 305 |
| | IgG1-ITNDRTPR | 306 |
| | G1-SNLFPR | 307 |
| Swap CH1 regions in IgG2 with those of IgG1, either | G2-RKEGSGNSFL | 308 |
| separate or together: | G2-RKEGSG | 309 |
| | G2-NSFL | 310 |
| | IgG2-TIDNTRRP | 311 |
| | G2-NSFLRP | 312 |
| IgG1 with CH2 domain residues of IgG2: | G1-G1-G2-G1-AY | 313 |
| | G1-G1-G2-G1-KH | 314 |
| IgG2 with CH2 domain residues of IgG1: | G2-G2.3-G1-G2-KH | 315 |
| | G2.5-G2.3-G1-G2-KH | 316 |
| | G2-G2.3-G1-G2-AY | 317 |
| | G2.5-G2.3-G1-G2-AY | 318 |
| Swap hinge regions between IgG1 and IgG2: | G1-G2.3-G1-G1-KH | 319 |
| | G2-G1-G2-G2-AY | 320 |
| | G2.5-G1-G2-G2-AY | 321 |
| | G1-G2-G1-G1-AY | 322 |
| | G2-G1-G2-G2-KH | 323 |
| | G2.5-G1-G2-G2-KH | 324 |
| Hinge truncations | IgG1-deltaHinge | 325 |
| | IgG2-deltaHinge | 326 |
| | IgG2.5-deltaHinge | 327 |
| | IgG1-deltaG237 | 328 |
| | IgG2-plusG237 | 329 |
| Other | IgG2.4 | 330 |
| | IgG2.3/4 | 331 |

[0904] The results, which are shown in FIG. 31, provide the following information in the context of CD73 internalization:
[0905] CH2 domain does not appear to have an impact as shown by
   [0906] a) very little difference in internalization ability was observed between the antibodies comprising a modified heavy chain constant region with format “AY” (having the IgG2 hinge ERKCCVECPPCPAPPVAG (SEQ ID NO: 8) relative to those with format “KH” (ERKCCVECPPCPAPELLGG (SEQ ID NO: 22) (Set 5, 6 and 7);
   [0907] b) CH2 swaps are comparable to wiltype G1 or G2 (Sets 5 and 6); and
   [0908] c) residue 237 has no impact on internalization: neither the addition of a “G” residue to an IgG2 hinge nor the deletion of the C terminal “G” in an IgG1 hinge affected internalization (Set 9).
[0909] This suggests that the CH2 domain does not impact internalization (i.e., the CH2 domain can be from IgG1 or IgG2);
[0910] Swapping the CH1 regions indicated in Set 3 (KRGEGSSNLF; KRGEGS; SNLF; ITNDRTPR and SNLFPR) in IgG1 with those of IgG2 provides little benefit, i.e., the internalization remains similar to that of IgG1; see Set 3);
[0911] Swapping the CH1 regions indicated in Set 4 (RKEGSGNSFL; RKEGSG; NSFL; TIDNTRRP and NSFLRP) in IgG2 with those of IgG1 has variable impact: changing NSFL has no impact, whereas the other 2 regions (RKEGSG & RP) are involved (see Set 4). Based on the results of Sets 3 and 4, it appears that there is an interaction between the CH1 region and the hinge, with RKEGSG and RP regions being more important than NSFL region;
[0912] The hinge region impacts internalization, i.e., the hinge of IgG2 provides better internalization relative to the hinge of IgG1 (see Sets 7 and 8). In addition, IgG1 with a deletion (G1-delta-hinge) improves internalization over IgG1. IgG2 with a deletion (G2-delta-hinge) provides a similar level of internalization relative to that of an IgG2 hinge. This suggests that the hinge region impacts internalization, which effect is enhanced by an IgG2 CH1 (G2-G1-G2-G2-AY is comparable to G1-G2-G1-G1-AY);
[0913] IgG2.4 (C220S) has similar or reduced internalization compared to IgG2.3 (C219S). IgG2.3/4 (C219S/C220S) has much reduced internalization compared to IgG2.3 or IgG2.4 alone (see Set 10). This suggests that internalization of an antibody with an IgG2 hinge and C219S is about the same as that of an IgG2 hinge with C220S, both of which are much better than that of an IgG2 hinge with both C219S and C220S;
[0914] IgG2.5 (C131S mutation) has reduced internalization compared to constructs with C131 (see Sets 1, 6 and 7).

[0915] Thus, these results indicate that the CH1 domain and the hinge are both relevant in the antibody mediated CD73 internalization, and that an antibody having the IgG2 sequences from these domains is internalized with better efficacy relative to an antibody having these regions from IgG1.

### Example 13: Antibodies Having an IgG2 Hinge and/or CHI Domain Form High Molecular Weight Complexes

[0916] CD73.4 antibodies having the heavy chain constant regions set forth in Table 27 were also tested for formation of high molecular weight complexes by SEC-MALS and DLS experiments, as described in Example 11.

[0917] Three out of the 16 antibodies in this study were previously tested: CD73.4-IgG1.1f, CD73.4-IgG2-C219S (also called CD73.4-IgG2.3), and CD73.4-IgG2-C219S-IgG1.1f (also called CD73.4-IgG2.3G1.1f-KH). SEC-MALS and DLS data of the antibodies alone showed retention times, masses, and hydrodynamic radii for each antibody that are typical for a monomeric monoclonal antibody. Equimolar complexes of each antibody (5.5 uM) with hCD73-his (5.5 uM) showed slower retention times for all complexes as compared to antibody or hCD73-his alone indicating the formation of complexes. An overlay of the SEC chromatogram data for each of the 16 complexes is shown in FIG. 32A. The chromatogram data can be divided into 4 distinct peaks, which are shown in FIG. 32B. Peak 1 contains the largest species, with MALS-determined masses suggesting complexes with mass equivalent of greater than 4:4 hCD73-his:mAb complexes. Peak 2 contains species with MALS-determined masses suggesting complexes of about 2:2 hCD73-his:mAb complexes. Peak 3 is a minor species with low signal and MALS-determined masses suggesting about 1:1 hCD73-his:mAb complexes. Peak 4 corresponds to the elution of the mAbs alone with MALS-determined masses consistent with free antibody. To quantitate the relative amounts of each species, the 4 peaks of each chromatogram were integrated as peak 1 (<12.9 min), peak 2 (12.9-15.1 min), peak 3 (15.1-16.7 min), peak 4 (16.7-19.3 min). The integration also included an additional integrated range called peak 5 (>19.3 min) to account for any low molecular weight species, which were found to be negligible (<3.5% for all complexes). The percentage of each species from this integration is summarized in Table 33. All complexes contained a similar small percentage of peak 3 (about 6-9%), but variable amounts of the other peaks. Most notable is that all complexes between hCD73-his and antibodies containing a CH1 domain from hIgG1 had a significantly greater percentage of smaller complexes (peak 2), whereas those containing CH1 domain from hIgG2 had a greater percentage of larger complexes (peak 1) (Table 33 and FIG. 32C). This suggests an important role for not only the hinge region but also the CH1 domain in higher order complex formation.

TABLE 33
Retention times of CD73.4 antibodies with modified heavy chain constant regions

| | UV % | | | | |
|---|---|---|---|---|---|
| | Peak1 | Peak2 | Peak3 | Peak4 | Peak5 |
| Complexes | <12.9 min | 12.9-15.1 min | 15.1-16.7 min | 16.7-19.3 min | >19.3 min |
| CD73.4-IgG2.3 + hCD73-his | 37.0 | 23.8 | 7.7 | 28.6 | 2.9 |
| CD73.4-IgG2.3G1.1f-KH + hCD73-his | 36.0 | 23.8 | 7.9 | 29.3 | 3.0 |
| CD73.4-IgG1.1f + hCD73-his | 28.4 | 36.2 | 7.4 | 25.6 | 2.3 |
| CD73.4-IgG1f + hCD73-his | 26.0 | 36.5 | 7.5 | 27.8 | 2.2 |
| CD73.4-IgG2.3G1-AY + hCD73-his | 30.2 | 24.3 | 8.1 | 34.4 | 3.0 |
| CD73.4-IgG2.3G1-KH + hCD73-his | 34.9 | 23.4 | 7.9 | 30.7 | 3.0 |
| CD73.4-IgG1-G2.3G1-AY + hCD73-his | 14.6 | 29.2 | 6.4 | 48.3 | 1.6 |
| CD73.4-IgG1-G2.3G1-KH + hCD73-his | 23.8 | 32.6 | 7.0 | 34.5 | 2.1 |
| CD73.4-IgG1-deltaTHT + hCD73-his | 28.3 | 35.4 | 7.0 | 26.9 | 2.4 |
| CD73.4-IgG2.3-plusTHT + hCD73-his | 30.6 | 24.3 | 8.3 | 33.7 | 3.2 |
| CD73.4-IgG2.3-plusGGG + hCD73-his | 30.0 | 23.9 | 8.2 | 34.9 | 2.9 |
| CD73.4-IgG2.5 + hCD73-his | 31.7 | 24.4 | 8.4 | 32.5 | 3.1 |
| CD73.4-IgG2.5G1.1f-KH + hCD73-his | 30.7 | 24.3 | 8.9 | 32.7 | 3.4 |
| CD73.4-IgG2.5G1-AY + hCD73-his | 26.3 | 24.8 | 8.1 | 38.3 | 2.6 |
| CD73.4-IgG2.5G1-KH + hCD73-his | 21.4 | 24.1 | 7.0 | 45.6 | 1.9 |
| CD73.4-IgG2.5-plusTHT + hCD73-his | 32.6 | 23.5 | 8.3 | 32.6 | 3.0 |

### Example 14: Fc Receptor Binding for Antibodies with Engineered Constant Domains

[0918] This Example demonstrates that antibodies having modified heavy chain constant regions comprising the CH1 and hinge of IgG2 bind to FcγRs when they contain CH2 and CH3 domains of IgG1.

[0919] In addition to antigen binding by the variable domains, antibodies can engage Fc-gamma receptors (FcgRs) through interaction with the constant domains. These interactions mediate effector functions such as antibody-dependent cellular cytotoxicity (ADCC) and antibody-dependent cellular phagocytosis (ADCP). Effector function activity is high for the IgG1 isotype, but very low or absent for IgG2 and IgG4 due to these isotypes having lower affinity for FcgRs. In addition, the effector function of IgG1 can be modified through mutation of amino acid residues within the constant regions to alter FcgR affinity and selectivity.

[0920] The binding of antibodies to Fc gamma receptors (FcγRs or FcgRs) was studied using biosensor technologies including Biacore surface plasmon resonance (SPR) and Fortebio Biolayer Interferometry (BLI). SPR studies were performed on a Biacore T100 instrument (GE Healthcare) at 25° C. The Fab fragment from a murine anti-6×His antibody was immobilized on a CM5 sensor chip using EDC/NHS to a density of −3000 RU. Various his-tagged FcgRs (7 ug/ml) were captured via the C-terminal his-tag using a contact time of 30 s at 10 ul/min, and the binding of 1.0 μM antibody was evaluated in a running buffer of 10 mM NaPO4, 130 mM NaCl, 0.05% p20 (PBS-T) pH 7.1. FcgRs used for these experiments included CD64 (FcgRI), CD32a-H131 (FcgRIIa-H131), CD32a-R131 (FcgRIIa-R131), CD32b (FcgRIIb), CD16a-V158 (FcgRIIIa-V158), CD16b-NA1 (FcgRIIIb-NA1), and CD16B-NA2 (FcgRIIIb-NA2). BLI experiments were performed on a Fortebio Octet RED instrument (Pall, Fortebio) at 25° C. in 10 mM NaPO4, 130 mM NaCl, 0.05% p20 (PBS-T) pH 7.1. Antibodies were captured out of undiluted expression supernatants on protein A coated sensors, followed by the binding of 1 μM hCD32a-H131, hCD32a-R131, hCD32b, hCD16a-V158, or 0.1 μM hCD64 analytes.

[0921] First, antibodies were made that contain modified IgG1 Fc domains including the substitutions S267E (SE) and S267E/L328F (SELF), as well as various combinations of the mutations P238D, P271G, H268D, A330R, G237D, E233D, referred to as V4, V7, V8, V9 and V12. The binding of these antibodies was studied by Biacore SPR with comparison to IgG1f, IgG2.3 (IgG2-C219S) and IgG4.1 (IgG4-S228P) antibodies, as well as an IgG1.1f antibody which has been engineered to reduce binding to all FcgRs. The results, which are shown in FIG. 33, demonstrate the expected FcgR binding properties for IgG1f, IgG2.3 and IgG4.1 and the mutated IgG1 antibodies, including increased CD32a-H131, CD32a-R131 and CD32b binding for SE and SELF, as well as increased selectivity of the V4, V7, V8, V9 and V12 mutants for CD32b over CD32a-H131 and CD32a-R131, FIG. 33.

[0922] The next set of constructs was used to engineer effector function into the otherwise effector function negative IgG2 isotype. For this study, the mutations described above were introduced in the context of an IgG2.3 constant region, or an IgG2.3/IgG1f hybrid termed IgG2.3G1-AY (Table 34). Antibodies were expressed at small scale as supernatants, and tested for binding to FcgRs using Fortebio Octet BioLayer Interferometry biosensor technology. Since the antibodies were present at low concentration in the supernatants, the experiment was performed by capturing antibodies out of the supernatants using protein A coated sensors, followed by binding of FcgR analytes in solution. Purified and supernatant control IgG1f including wild type IgG1, SE, P238D, V4 and V12 antibodies were also included for comparison, and each of these control antibodies demonstrated expected FcgR binding properties (FIG. 34). The IgG2.3 antibody also demonstrated the expected binding profile, with appreciable binding to only CD32a-H131. However, all mutations to introduce S267E, L328F, P238D, P271G, H268D, A330R, G237D, or E233D mutations into IgG2.3 failed to recapitulate the FcgR affinity of the corresponding engineered IgG1 mAbs (FIG. 34). In contrast, the IgG2.3G1-AY construct was able to fully preserve the FcgR binding properties of wild type IgG1, while retaining the CH1 and hinge regions of IgG2.3. In addition, all IgG2.3G1-AY mutants containing S267E, L328F, P238D, P271G, H268D, A330R, G237D, and E233D demonstrated FcgR binding properties comparable to the IgG1 version mAbs containing the same mutations (FIG. 34). This demonstrates the successful engineering of antibodies with CH1 and hinge regions of IgG2 combined with the effector function of wild type or mutant IgG1.

TABLE 34
Engineered IgG2 constructs

| Set | ID | Construct | Seq ID# |
|---|---|---|---|
| 1 | IgG2.3 | hHC-IgG2-C219S | 268 |
| | IgG2.3-V13 | hHC-IgG2-C219S - P238D | 332 |
| | IgG2.3-V14 | hHC-IgG2-C219S - P238D, P271G | 333 |
| | IgG2.3-V15 | hHC-IgG2-C219S - P238D, H268D, P271G | 334 |
| | IgG2.3-V16 | hHC-IgG2-C219S - P238D, P271G, A330R | 335 |
| | IgG2.3-V17 | hHC-IgG2-C219S - P238D, H268D, P271G, A330R | 336 |
| | IgG2.3-V18 | hHC-IgG2-C219S - S267E | 337 |
| | IgG2.3-V19 | hHC-IgG2-C219S - S267E, L328F | 338 |
| 2 | IgG2.3G1 | hHC-IgG2-C219S/hHC-IgG1f | 269 |
| | IgG2.3G1-AY-V20 | hHC-IgG2-C219S/hHC-IgG1f - P238D | 339 |
| | IgG2.3G1-AY-V21 | hHC-IgG2-C219S/hHC-IgG1f - P238D, P271G | 340 |
| | IgG2.3G1-AY-V22 | hHC-IgG2-C219S/hHC-IgG1f - | 341 |
| | | P238D, H268D, P271G | |
| | IgG2.3G1-AY-V23 | hHC-IgG2-C219S/hHC-IgG1f - | 342 |
| | | P238D, P271G, A330R | |
| | IgG2.3G1-AY-V24 | hHC-IgG2-C219S/hHC-IgG1f - | 343 |
| | | P238D, H268D, P271G, A330R | |
| | IgG2.3G1-AY-V25 | hHC-IgG2-C219S/hHC-IgG1f - | 344 |
| | | G237D, P238D, H268D, P271G, A330R | |
| | IgG2.3G1-AY-V26 | hHC-IgG2-C219S/hHC-IgG1f - | 345 |
| | | E233D, G237D, P238D, H268D, P271G, A330R | |
| | IgG2.3G1-AY-V27 | hHC-IgG2-C219S/hHC-IgG1f - S267E | 346 |
| | IgG2.3G1-AY-V28 | hHC-IgG2-C219S/hHC-IgG1f - S267E, L328F | 347 |

[0923] This engineering strategy was further explored by producing other antibodies formatted with IgG2.3G1-AY, IgG2.3G1-AY-S267E (IgG2.3G1-AY-V27), as well as IgG2-B-form variants (IgG2.5G1-AY and IgG2.5G1-AY-V27), and other hybrid antibodies containing different combinations of IgG1 and IgG2 constant domains, and testing the binding of these antibodies to anti-his Fab captured his-tagged FcgRs using Biacore SPR technology. In agreement with the Octet supernatant data, the SPR data showed that the IgG2.3G1-AY and IgG2.3G1-AY-V27 antibodies had comparable FcgR binding properties to IgG1f and IgG1f-S267E, respectively, despite containing the CH1 and hinge regions of an A-form IgG2 antibody (IgG2.3) (Table 35). Similar data was also obtained using IgG2.5G1-AY and IgG2.5G1-AY-V27 antibodies, demonstrating the successful engineering of B-form IgG2 antibodies (containing C131S mutation termed IgG2.5) having IgG1f or modified IgG1f like effector functions. Data for several other antibodies with IgG2.3G1-AY, IgG2.3G1-AY-V27, IgG2.5G1-AY, or IgG2.5G1-AY-V27 constant regions but different variable regions showed that this engineering strategy is broadly applicable to other antibodies independent of the variable domains (Table 35). Other constructs that demonstrate IgG1f-like FcgR binding properties include IgG1-G2.3G1-AY, and IgG1deltaTHT, whereas several of the modified constant region constructs were unable to retain IgG1f-like FcgR binding properties, including IgG2.3G1-KH, IgG2.5G1-KH, IgG2.3plusTHT, IgG2.5plusTHT and IgG2.3plusGGG constructs (Table 35).

TABLE 35
% Rmax values for 1 μM antibody binding to anti-his Fab captured FcgR-his proteins

| | | hCD32a- | hCD32a- | | hCD16a- | hCD16B- |
|---|---|---|---|---|---|---|
| mAb | hCD64 | H131 | R131 | hCD32b | V158 | NA2 |
| mAb8-IgG1f | 80% | 82% | 51% | 27% | 51% | 21% |
| mAb9-IgG1f | 70% | 33% | 19% | 4% | 28% | 10% |
| CD73.4-IgG1f | 65% | 46% | 26% | 6% | 43% | 17% |
| CD73.4-IgG1.1f | 2% | 0% | 2% | 1% | 0% | 0% |
| mAb11-IgG2.3 | 2% | 44% | 17% | 5% | 1% | 0% |
| CD73.4-IgG2.3 | 3% | 48% | 11% | 1% | 1% | 0% |
| mAb6-IgG2.3 | 3% | 66% | 14% | 3% | 1% | 0% |
| mAb4-IgG2.3 | 1% | 39% | 6% | 1% | 1% | 0% |
| mAb5-IgG2.3 | 6% | 100% | 30% | 4% | 3% | 0% |
| mAb12-IgG2.3 | 2% | 39% | 7% | 1% | 1% | 0% |
| mAb13-IgG2.3 | 2% | 40% | 7% | 1% | 1% | 0% |
| mAb11-IgG2.5 | 0% | 40% | 13% | 3% | 0% | −1% |
| mAb7-IgG2.5 | 4% | 72% | 19% | 2% | 2% | 0% |
| mAb8-IgG2.5 | 3% | 59% | 14% | 3% | 2% | 0% |
| mAb10-IgG2.5 | 1% | 29% | 5% | 1% | 1% | 0% |
| CD73.4-IgG2.5 | 3% | 40% | 7% | 1% | 1% | 0% |
| mAb6-IgG2.5 | 3% | 75% | 17% | 4% | 2% | 0% |
| mAb4-IgG2.5 | 2% | 46% | 8% | 1% | 1% | 0% |
| mAb5-IgG2.5 | 6% | 89% | 26% | 5% | 4% | 1% |
| mAb12-IgG2.5 | 1% | 36% | 6% | 1% | 1% | 0% |
| mAb13-IgG2.5 | −2% | 39% | 4% | −2% | 0% | −2% |
| mAb8-IgG2.3G1-AY | 77% | 61% | 38% | 10% | 38% | 13% |
| mAb10-IgG2.3G1-AY | 67% | 23% | 14% | 4% | 24% | 8% |
| CD73.4-IgG2.3G1-AY | 65% | 38% | 20% | 5% | 38% | 14% |
| mAb7-IgG2.5G1-AY | 80% | 73% | 45% | 12% | 47% | 19% |
| mAb8-IgG2.5G1-AY | 77% | 70% | 45% | 17% | 48% | 22% |
| CD73.4-IgG2.5G1-AY | 65% | 43% | 24% | 7% | 40% | 16% |
| CD73.4-IgG2.3G1-KH | 2% | 15% | 2% | 0% | 2% | 0% |
| CD73.4-IgG2.5G1-KH | 2% | 17% | 2% | 0% | 3% | 0% |
| CD73.4-IgG2.3G1.1f-KH | 1% | 10% | 1% | 0% | 1% | 0% |
| CD73.4-IgG2.5G1.1f-KH | 1% | 6% | 1% | 0% | 1% | 0% |
| mAb7-IgG2.3G1-AY-V27 | 84% | 68% | 92% | 76% | 26% | 7% |
| mAb8-IgG2.3G1-AY-V27 | 78% | 67% | 80% | 67% | 24% | 7% |
| mAb10-IgG2.3G1-AY-V27 | 69% | 24% | 57% | 40% | 12% | 3% |
| mAb7-IgG2.5G1-AY-V27 | 81% | 74% | 89% | 84% | 32% | 9% |
| mAb8-IgG2.5G1-AY-V27 | 77% | 76% | 79% | 77% | 33% | 10% |
| CD73.4-IgG1-G2.3G1-AY | 66% | 50% | 31% | 10% | 48% | 23% |
| CD73.4-IgG1-G2.3G1-KH | 2% | 18% | 2% | 0% | 4% | 1% |
| CD73.4-IgG1deltaTHT | 65% | 43% | 23% | 6% | 42% | 17% |
| CD73.4-IgG2.3plusTHT | 3% | 42% | 8% | 1% | 1% | 0% |
| CD73.4-IgG2.5plusTHT | 2% | 34% | 7% | 1% | 1% | 0% |
| CD73.4-IgG2.3plusGGG | 3% | 43% | 8% | 1% | 1% | 0% |

Taken together these data show that the sequence in IgG1 immediately C-terminal to the conserved CPPCPAP (SEQ ID NO: 380) motif in the hinge region confers FcgR-mediated effector function, whereas the CH1 and upper portions of the hinge of the antibody can be replaced with IgG2 or modified IgG2 sequences, to potentially combine the effector functions of IgG1 and modified IgG1 with the superior internalization or signaling properties of antibodies containing IgG2 CH1 and/or hinge regions.

[0924] In a separate series of experiments, it was shown that CD73 antibody CD73.4-IgG2C219S.IgG1.1f does not mediate effector function in vitro. In ADCC experiments using primary NK cells as effectors and CD73-expressing Calu-6 tumor cells as targets, CD73.4-IgG2C219S.IgG1.1f did not induce killing of target cells up to a concentration of 3 μg/mL, whereas a control IgG1 CD73 mAb did induce ADCC. In CDC and ADCP experiments (ADCP experiments used primary macrophages as effector and Calu-6 as targets), CD73.4-IgG2C219S.IgG1.1f did not induce lysis of targets up to 10 μg/mL or 1 μg/mL, respectively, whereas a control IgG1 CD73 mAb did induce lysis. These results demonstrate that CD73.4-IgG2C219S.IgG1.1f lacks Fc effector function; therefore, depletion of CD73-expressing cells is unlikely to be seen when administered to humans.

### Example 15: Co-Localization of Anti-CD73 Antibody with Lysosmal Markers Upon Antibody Internalization

[0925] This example shows the detailed mechanisms of internalization and associated dynamics that follow internalization of anti-CD73 Ab into Calu6 cells. The antibodies are co-localized with early endosome marker EEA1, late endosome marker Rab7 and lysosome marker Lamp-1.

[0926] In this experiment, Calu6 cells were subjected to pulse chase analysis with Alexa fluor647 labeled anti-CD73 antibodies 11F11, 6E11 and 4C3. The cells were first chilled on ice for 15 minutes, then bound to 2 μg/ml of 11F11, 6E11 and 4C3 respectively for 30 minutes on ice (pulse). The unbound antibodies were washed off using cold media after the 30 min binding, and cells were brought up to 37° C. to start the chase. The internalization reactions were set for 5 time points, at 0, 15, 30, 60 or 120 minutes, followed by fixing the cells with 4% paraformaldehyde. Upon fixing, cells were permeabilized and stained with endocytic marker antibodies, anti-EEA1, anti-Rab7 and anti-Lamp1 (Cell signaling Technologies, MA) at room temperature for one hour followed by labeling with Alexa fluor 488 conjugated goat-anti-rabbit secondary antibody (Life technologies, IL). The cells were then imaged on an Opera confocal system (Pelkin Elmer, Mass.) with a 60X water immersion objective. The fluorescence from both anti-73 antibody and endocytic markers was measured and represented as a colocalization coefficient in histogram format.

[0927] The results, which are shown in FIGS. 36A-36C, indicate that the anti-CD73 antibody 11F11 colocalizes with EEA1, Rab7 and Lamp-1, and that the rank order of antibody localization to early endosomes matches functional and receptor depletion data.

### Example 16: CD73 Expression Profiling in Human Tumors by Tumor Microarray

[0928] This example shows the level of CD73 expression in human tumors, as determined by IHC with mAb 1D7 in multiple tissue micro-array (TMA).

[0929] For initial screening, immunohistochemistry (IHC) with the commercial mouse monoclonal antibody (mAb) anti-human CD 73 clone 1D7 (Abcam) was conducted in multiple FFPE (formalin fixed paraffin embedded) TMAs that included 15 tumor types. There were 9 to 52 samples for each tumor type. TMAs were purchased from commercial sources. To detect CD73 tissue binding, an automated IHC assay using a Mach 3 detection kit (BioCare Medical) was developed to Dako Autostainer Plus platform. Briefly, antigen retrieval was performed with HIER (Heat-induced antigen retrieval) solution pH 9 (Dako) for 20 min at 95° C. mAb 1D7 was diluted 1:750 and incubated for 60 minutes, followed by Mach 3 mouse probe for 20 minutes and then Mach 3 polymer for another 20 min. Finally, slides were reacted with the DAB substrate-chromogen solution for 6 minutes. Slides were then counterstained with hematoxylin, dehydrated, cleared, and coverslipped with DePeX following routine histological procedures. Dako protein block and FLEX antibody diluent were used as a non-specific block and diluent for primary antibody, respectively. To determine levels of CD73, a semi-quantitative scoring method that captures both the staining intensity (score of 1 to 3) and frequency (score of 1 to 4) on the surface membrane or cytoplasm of tumor cells was used.

[0930] The results, which are shown in FIGS. 37A and 37B, indicate that CD73 is expressed both in the cytoplasm and surface membrane of tumor cells. Among the tumor types examined, tumor cell membrane staining (FIG. 37B) was high in thyroid carcinoma, hepatocellular carcinoma, head and neck squamous cell carcinoma, pancreatic adenocarcinoma, colorectal adenocarcinoma, and endometrium carcinoma; was moderate in non-small cell carcinoma, renal cell carcinoma, and gastric carcinoma; was low in ovarian adenocarcinoma, prostate adenocarcinoma, bladder carcinoma, esophageal squamous cell carcinoma, and lymphoma, and was not expressed in BrC.

### Example 17: CD73 Expression in Multiple Tumor Types, as Determined by Immunohistochemistry on Full Tissue Sections

[0931] This example shows the level of CD73 on the surface membrane and in the cytoplasm of tumor cells of multiple tumor types, as determined by immunohistochemistry (IHC) with mAb D7F9A on full tissue sections.

[0932] Further IHC with rabbit mAb anti-human CD73 clone D7F9A (Cell Signaling Technology) was performed in regular full size FFPE sections from 7 tumor types, including colorectal adenocarcinoma (CRC), endometrium carcinoma (EC), thyroid carcinoma (TC), head and neck squamous cell carcinoma (HNSCC), non-small cell carcinoma (NSCLC), ovarian adenocarcinoma (OvC), and pancreatic adenocarcinoma (PC). There were 30 samples for each tumor type except NSCLC, for which there were 20 each of lung adenocarcinoma (ADLC) and squamous cell carcinoma (SQLC).

[0933] To detect CD73 tissue binding, an automated IHC assay using the Bond Polymer Refine Detection Kit (Leica) was developed to BondRx platform. Briefly, antigen retrieval was performed with Bond epitope retrieval solution 2 (pH 9) for 20 min at 100° C. mAb D7F9A was diluted to 0.5 μg/ml and incubated for 60 minutes, followed by polymer from Refine Detection Kit for 30 min. Finally, slides were reacted with DAB substrate-chromogen solution for 6 minutes. Slides were then counterstained with hematoxylin, dehydrated, cleared, and coverslipped with DePeX following routine histological procedures. Dako protein block supplemented 0.5% human gamma globulins or Dako protein block were used as a non-specific block and diluent for the primary antibody, respectively. To determine levels of CD73, H-score that captures both the staining intensity (score of 1 to 3) and frequency (score of 0 to 100) on the surface membrane or cytoplasm of tumor cells was assessed under a light microscope.

[0934] The results, which are shown in FIGS. 38A and 38B, show a similar staining pattern of both membranous and cytoplasmic labeling in tumor cells. Using a membrane H score of 100 and 50 as cut-off criteria for high and moderate expression, respectively, ADLC, TC, PC, and EC showed high expression, CRC and SQLC showed moderate expression, and HNSCC and OvC showed low expression. A small fraction of TILs were also found to be CD73 positive.

[0935] FIGS. 39A-39H show the level of CD73 expression in individual samples of each of the tumor types. The results show that, even in tumors expressing a lower level of CD73 on average (FIG. 38), certain samples contain a high level of CD73.

### Example 18: PD-1 Levels on Tumor Infiltrating Lymphocytes of Certain Tumor Types

[0936] This example shows the frequency of PD-1 expression on T cells from peripheral blood and the tumor microenvironment in patients with colon adenocarcinoma, renal cell carcinoma, and lung adenocarcinoma. Briefly, fresh tumor samples and matching peripheral blood were stained for PD-1, CD8, CD4, and Foxp3, and assessed by flow cytometry.

[0937] The level of PD-1 on peripheral T cells and TILs was determined as follows. Tumor tissues were weighed and dissociated using the Miltenyi dissociation kit (Miltenyi, Cat#130-095-929), whereas peripheral blood cells were isolated after lysis of red blood cells in RBC Lysis Buffer (Biolegend, Cat#420301). Cell suspensions (from tumor or peripheral blood) were washed two times in HBSS (no Ca, no Mg), stained with NIR Viability Dye (Molecular Probes by Life Technologies # L34976), blocked with human AB serum in Dulbecco's PBS (dPBS), and added to wells containing cocktails of antibodies for incubation on ice in the dark for 45 minutes. Cells were then washed twice with dPBS/BSA/Na azide, fixed, and permeabilized using the FoxP3 buffer kit (Biolegend Cat#421403). Fluorescence minus one (FMO) controls were prepared for all antibodies and used to determine positive cell populations. Samples were acquired on the BD Fortessa flow cytometer (Becton Dickinson) and data was analyzed using Flowjo X Software (Flowjo).

[0938] The results, which are shown in FIG. 40, indicate that the frequency of PD-1 expression is higher on tumor-infiltrating T cells, and lower on peripheral T cells. In particular, PD-1 is expressed at higher levels on CD8+ T cells, CD4+ FoxP3−, and CD4+ FoxP3+ T cells in tumors than in blood, and was detected in the three tumors tested.

[0939] Thus, based at least on the presence of high levels of CD73 tumor expression (by IHC) and PD-1 TIL expression in colon adenocarcinomas, renal cell carcinomas, and lung adenocarcinomas (by flow cytometry), a combination of a CD73 antagonist and a PD-1 antagonist would be effective in treating these cancers.

### Example 19: Inhibition of Tumor Growth In Vivo by Combination Treatment with Anti-CD73 Antibody and Anti-PD-1 Antibody

[0940] An experiment was conducted in a murine MC38 colon adenocarcinoma tumor model in order to examine the anti-tumor activity of combined treatment with an anti-CD73 antibody and an anti-PD-1 antibody.

[0941] The dosing regimen used is shown in Table 36 below. Dosing volumes for intraperitoneal (IP) treatments were adjusted to 0.2 mL with phosphate-buffered saline (PBS).

TABLE 36

| | Concentration | Dosing volume |
|---|---|---|
| Antibody | (mg/mL) | (mL/mouse) |
| Mouse IgG1 isotype (10 mg/kg) | 5.54 | 0.036 |
| Anti-PD-1 mIgG1 (10 mg/kg) | 6.51 | 0.03 |
| Anti-CD73 mIgG1 (5 mg/kg) | 11.87 | 0.008 |
| Anti-CD73 mIgG1 (10 mg/kg) | 11.87 | 0.017 |
| Anti-CD73 mIgG1 (20 mg/kg) | 11.87 | 0.033 |

^{a}Mouse anti-diptheria toxin mAb (igG1 isotype control)
^{b}Chimeric anti-PD-1 mIgG1
^{c}Anti-mouse CD73 antibody

[0942] Female Black 6 (B6NTac) mice were used. Mice were provided with food and water ad libitum. MC38 cells were cultured in Dulbecco's modified eagle medium (DMEM) with 10% heat-inactivated fetal bovine serum (FBS). Cells were split 1:10 every 2 days. The right flank of each mouse was subcutaneously implanted with 2×10⁶ cells in 0.2 mL PBS, using a 1-cm³ syringe and a 25-gauge half-inch needle (day 0). On Day 7 post implantation, 104 mice were randomized to 8 groups of 13 mice each according to their tumor volume, which was measured using the formula L×W×H/2. After randomization, all groups had average tumor volumes of approximately 87 mm³. On Days 7, 11, and 14, the designated anti-mouse CD73 and/or anti-mouse PD-1 mAbs or isotype control was administered IP. Tumors and body weights were measured twice weekly through study termination. Tumors were measured in 3 dimensions with a Fowler Electronic Digital Caliper (Model 62379-531; Fred V. Fowler Co., Newton, Mass.), and data were electronically recorded using StudyDirector software from Studylog Systems, Inc. (South San Francisco, Calif.). Animals were checked daily for postural, grooming, and respiratory changes, as well as lethargy. Mice were euthanized when the tumors reached the 2000 mm³ endpoint or appeared ulcerated.

[0943] As shown in FIGS. 41A-41D and 42A-42D, when anti-CD73 antibody was used in combination with anti-PD-1 antibody, a significant delay in tumor growth was seen with every anti-CD73 dose tested (FIGS. 42A-42D). More mice were tumor free (TF) in the groups treated with a combination of anti-CD73 antibody and anti-PD-1 antibody ( 5/13, 4/13, and 5/13 in the 5, 10, and 20 mg/kg groups, respectively) than in the groups treated with either therapeutic agent alone ( 2/13 in anti-PD-1 antibody group and 0/13 in anti-CD73 antibody group) at the end of the study.

[0944] Mean tumor growth inhibition (TGI) could not be calculated directly due to the high incidence (15% to 69%) of early ulceration (mostly Day 10 to 20 after tumor implant) and subsequent euthanasia. Thus, to assess tumor growth inhibition and overall survival, if a mouse showed tumor ulceration before 27 days after tumor implant (about 3 tumor doubling times after onset of drug treatment on Day 7), the tumor growth data associated with that mouse were excluded. As a result, there were not enough mice left for anti-CD73 antibody monotherapy groups, whereas there were sufficient mice (8-13) remaining in the mIgG1antibody, anti-PD-1 antibody alone, and anti-PD-1 antibody+anti-CD73 antibody groups. Thus, only mIgG and anti-PD-1 antibody containing groups were analyzed for TGI and survival. Median tumor volumes for these groups are shown in FIG. 43. TGI on Day 27 (about 3 doubling times after onset of drug treatment on Day 7) was calculated based on the median value of area under the tumor volume vs. time curve after correction of initial tumor volume. The TGI values were 80% for the anti-PD-1 antibody group, and 100%, 97%, and 105% for the 5, 10, and 20 mg/kg anti-CD73 antibody+anti-PD-1 antibody groups, respectively.

[0945] Survival was defined as tumor size <2000 mm³ and no tumor ulceration. As shown in FIG. 44, both anti-PD-1 antibody monotherapy and anti-PD-1 antibody combined with anti-CD73 antibody demonstrated a survival benefit compared with mIgG1 treatment. Combinational therapy of anti-PD-1 antibody with 5 or 20 mg/kg anti-CD73 antibody both showed better survival than did anti-PD-1 antibody monotherapy.

[0946] These results suggest that, in a staged MC38 syngeneic tumor model, anti-CD73 antibody treatment alone did not promote antitumor activity, but when combined with an anti-PD-1 antibody, a significant delay in tumor growth was observed, and approximately 35% of mice were tumor free by the end of the study. The synergistic effect of anti-CD73 antibody combined with anti-PD-1 antibody was demonstrated by the increased incidence of tumor-free mice, increased TGI, and improved survival.

[0947] The combination of an anti-CD73 antibody and an anti-PD-1 Ab also had anti-tumor efficacy in the unstaged CT26 cancer model. Briefly, unstaged CT26 tumor was dosed every 4 days 3 times total at 200 μg/mouse (about 10 mg/kg) of CD73 antibody TY/23 alone or together with an anti-PD1 antibody. The results, which are shown in FIGS. 45A-45D, indicate that the combination of anti-CD73 and anti-PD-1 antibodies have a stronger anti-tumor effect than either one alone.

### Example 20: Pre-Clinical Metabolism and Pharmacokinetics

[0948] CD73.4-IgG2C219S.IgG1.1f demonstrated evident non-linear PK following single intravenous (IV) dosing in cynomolgus monkeys, likely due to target-mediated drug disposition. At doses from 5 to 40 mg/kg, systemic total serum clearance (CLT) decreased from 0.85 to 0.22 mL/h/kg. Volume of distribution at steady-state (Vss) was similar among the different dose levels, ranging from 0.042 to 0.068 L/kg, suggesting that CD73.4-IgG2C219S.IgG1.1f mainly resides in the extravascular space. Given the different CLT values with similar Vss, apparent terminal phase half-life (T-HALF) increased from 20 hours to 238 hours over the dose range from 5 to 40 mg/kg.

[0949] CD73.4-IgG2C219S.IgG1.1f treatment resulted in pharmacologically-mediated rapid decreases in serum free soluble CD73 (sCD73) at all doses within 24 hours in most of the monkeys during the dosing period. Free serum sCD73 was fully suppressed (>98%) at concentrations of CD73.4-IgG2C219S.IgG1.1f>1 nM. In contrast, serum concentrations of total sCD73 increased following administration of CD73.4-IgG2C219S.IgG1.1f. The accumulation of total serum sCD73 is likely due to the shift in the clearance mechanism of total sCD73. At baseline levels, total sCD73 consists mainly of free sCD73, which is eliminated by its own clearance pathway. However, following administration of CD73.4-IgG2C219S.IgG1.1f, the majority of total sCD73 is accounted for by the CD73.4-IgG2C219S.IgG1.1f/sCD73 complex, which probably undergoes slower elimination than sCD73 alone.

### Example 21: Absence of CD73.4-IgG2C219S.IgG1.1f Effect on Cytokine Release in Whole Blood

[0950] Cytokine release mediated by CD73.4-IgG2C219S.IgG1.1f was assessed in human normal whole blood samples from 8 donors. A panel of 61 cytokines was evaluated to address the potential for immune cell activation upon exposure to CD73.4-IgG2C219S.IgG1.1f. Results showed that addition of CD73.4-IgG2C219S.IgG1.1f (10 μg/mL) to donor blood samples did not mediate cytokine secretion at detectable levels in comparison to the isotype controls. These data confirm the expected result indicating that CD73.4-IgG2C219S.IgG1.1f is not an activator of cells within whole blood. These data are also consistent with the data obtained in a cytokine release assay with PBMCs using dried coat format, and indicate that whole blood constituents are not activated upon exposure to CD73.4-IgG2C219S.IgG1.1f.

### Example 22: Determination of Occupancy of Human CD73 Receptor by Anti-Human CD73 Antibody

### Materials and Methods

### Monoclonal Antibodies and Reagents

[0951] Mouse anti-human IgG1-PE, Clone IS1112E4.23.20 (Miltenyi Biotec, San Diego, Calif.) was used for direct detection of bound compound. IgG1 Isotype-PE (Miltenyi Biotec) was used to assess background binding and provided a reference to calculate receptor occupancy for each sample analyzed. CD3-BV421, clone UCHT1 (BD Biosciences, San Jose, Calif.); CD4-PerCP/Cy5.5, clone OKT4(Biolegend); CD8-PE-Cy7, clone SK1(Biolegend); CD19-APC, clone HIB19(Biolegend); were used to assist with identification of T cell subsets and B cells. Mouse IgG (Sigma-Aldrich, St. Louis, Mo.) was used to prevent non-specific binding. A CD73 antibody described herein and comprising a human IgG2 hinge region and human IgG1 FC portion was used. The IgG2 hinge region was designed to promote antibody internalization, thereby reducing activity levels of CD73. Whole blood samples were lysed and fixed prior to flow cytometry acquisition with BD FACS™ Lysing Solution (BD Biosciences).

### Peripheral Blood Samples and QC Material

[0952] Whole blood samples from normal healthy human donors were drawn into Sodium Heparin Vacutainers® (BD Biosciences). It was expected that CD73 expression from normal human healthy donors would be similar in expression level to patient samples collected during the clinical trial. For this reason, whole blood from patient samples was not obtained for development and validation. For assay validation purposes, whole blood samples were spiked with concentrations of a CD73 antibody. Samples spiked with the CD73 antibody were incubated for 30 minutes at 37° C., and then sat at room temperature until processed. Whole blood samples were used to assess dose response, intra-assay performance, and post-collection sample stability. Following assay validation, the assay was transferred to a CRO for the purpose of analyzing whole blood samples collected from subjects participating in the clinical protocol. CD-Chex® Plus Normal (Streck Laboratories, Omaha, Nebr.), a preserved whole blood sample, was processed with each daily run to assess assay performance.

### CD73 Receptor Occupancy Procedure

[0953] Whole blood or CD-Chex® Plus Normal was stained by a direct immunofluorescence staining technique. Briefly, 100 μL of whole blood or CD-Chex® Plus Normal was aliquoted each to three 12×75 mm tubes. Two aliquots were incubated with 10 μL of a saturating dose of CD73 antibody described herein (5 μg/mL), while the remaining aliquot received 10 μL of PBS with 0.1% NaN3. Following treatment with compound, excess compound was washed away from all aliquots. All assay tubes were then treated with mouse serum for 10 minutes on ice to minimize non-specific binding of fluorochrome conjugated reagents. Fluorochrome conjugates for CD3, CD4, CD8, and CD19 were added to all assay tubes and incubated for 30 minutes on ice in the dark. All aliquots were washed, and then lysed and fixed with 1 mL of 1×FACS™ Lysing Solution for 10 min at room temperature in the dark. Aliquots were then centrifuged, decanted, and then resuspended in PBS with 0.1% NaN3.

### Flow Cytometry Analysis

[0954] Optimal performance characteristics of the FACSCanto (BD Biosciences) flow cytometer was verified daily using the Becton Dickinson's Cytometer Setup and Tracking System. Compensation was set using BD Compensation Beads (BD Biosciences). At least 3,000 CD19+B cells were acquired per staining tube.

### ApplCalculations

[0955] Receptor occupancy of CD73 antibody to CD73 to target was derived using measured mean fluorescence intensity results from each assay tube.

% RO calculation: {[ΔMFI of Bound(Bound-isotype)]/[(ΔMFI of Total(Total-isotype)]}×100

### Fit-for-Purpose Validation Strategy

[0956] The flow cytometry assay method was validated following the Fit-for-purpose biomarker assay development and validation model. Pre-validation considerations included intended use for assay, assay precision, post-collection sample stability, and quality control. To assess intra-assay precision, whole blood samples were not spiked or spiked with 0, 0.0005, 0.005, 0.05, and 5 μg/mL of CD73 antibody, and then processed in three replicates. To determine whole blood sample stability, samples were not spiked or spiked with CD73 antibody, then allowed to sit at room temperature for 72 hours. Each sample was processed by at 0, 24, 48, 72, hours post-collection. CD-Chex® Plus Normal, a preserved whole blood sample, was used a quality control material to monitor the immunophenotyping procedure of the receptor occupancy assay. Each lot of CD-Chex® Plus Normal was analyzed 5 times to determine the 95% confidence interval to qualify future analytical runs.

### Clinical Trial Implementation

[0957] Receptor occupancy of CD73 antibody to CD73 of target cell populations may be used, e.g., as an exploratory biomarker method in a clinical trial.

### Results

[0958] For this direct detection receptor occupancy assay, commercially available anti-human IgG1-PE were screened. Ideally, an anti-idiotypic antibody that binds specifically to target is recommended for a direct detection, receptor occupancy assay. Clones of anti-IgG1-PE were tested to determine if an antibody could recognize the anti-CD73 antibody on cell subsets from human whole blood in a dose dependent manner. A titration was performed using three anti-human IgG1-PE antibodies (IS1112E.4.23.20, AP10D10, and HP6069). To determine the total receptor expression level, whole blood was treated with a saturating dose of the anti-CD73 antibody. Additionally, an aliquot of whole blood was untreated with the anti-CD73 antibody to determine nonspecific binding of each antibody. Clone IS1112E.4.23.30 was selected as it binds to the anti-CD73 antibody and has the best signal/noise ratio relative to other antibody candidates (FIG. 46).

[0959] Using clone IS1112E.E.23.30, dose response curves were generated by treating whole blood collected from normal healthy donors with serial dilution concentrations of the anti-CD73 antibody (FIG. 47). This data was used to select concentrations for additional validation, and technology transfer to a CRO (0, 0.0005, 0.005, 0.05, and 5 μg/mL). Assay precision of measured (FIG. 48) and derived results (FIG. 49) was assessed from three normal healthy donors (see Table below).

| | | % RO | | % RO |
|---|---|---|---|---|
| | | CD4+ T cells | | CD19+ B cells |
| Therapeutic | | (Mean ± SD) | % RO CD8+ T cells | (Mean ± SD) |
| Treatment | | n = 3 | (Mean ± SD) n = 3 | n = 3 |
| 0 | μg/mL | 6.7 ± 2.4 | 1.0 ± 1.4 | 3.0 ± 3.3 |
| 0.0005 | μg/mL | 14.9 ± 6.1 | 5.3 ± 4.7 | 12.9 ± 11.3 |
| 0.005 | μg/mL | 55.1 ± 19.4 | 40.8 ± 8.6 | 56.1 ± 2.8 |
| 0.05 | μg/mL | 85.8 ± 21.0 | 90.1 ± 9.5 | 85.3 ± 19.3 |
| 5 | μg/mL | 89.9 ± 6.8 | 97.5 ± 10.0 | 97.3 ± 15.8 |

[0960] Next, stability of collected whole blood samples was assessed to determine optimal time post-collection to perform the receptor occupancy procedure on samples from a clinical trial (FIG. 50). Based on the data collected, it was determined that this receptor occupancy assay is best performed using patient samples between 24 and 48 hours post-collection. Considerations for making this determination include such factors as variability in receptor expression levels of target cell populations, variability in receptor occupancy result, as well as domestic and international shipping logistics.

[0961] A quality control material was identified to assist with verifying daily assay performance. CD-Chex Plus is a commercially available fixed whole blood sample with extended stability. Data showed detectable surface CD73 expression on target populations and was used to monitor the staining procedure of the receptor occupancy assay (FIG. 51).

### Example 25: Electron Microscopy Imaging of CD73 and Antibody Complexes

[0962] Negative stain transmission electron microscopy (TEM) imaging and 2D class averaging analysis was performed on complexes of CD73 antibodies (CD73.4) having an IgG1 or IgG2.C219S constant region with human CD73. Briefly, soluble full length human CD73 and the given antibody were mixed at a 1:1 molar ratio for 1 hour at room temperature, with the final concentration of both components being 8.2 uM. Both samples were then diluted 1:20 with buffer for imaging using an FEI Tecnai T12 electron microscope operating at 120 keV equipped with an FEI Eagle 4 k×4 k CCD camera. Negative stain grids were transferred into the electron microscope. Images of each grid were acquired at multiple scales to assess the overall distribution of the specimen. After identifying potentially suitable target areas for imaging at lower magnifications, high magnification images were acquired at a nominal magnification of 67,000× (0.16 nm/pixel). The images were acquired at a nominal underfocus of −2.5 μm to −1.5 μm and electron doses of −30 e−/Å2.

[0963] Images, of which, examples are provided in FIG. 52, show that different types of complexes are formed with the IgG1 and IgG2.C219S based antibodies, respectively. Antigen-antibody complexes made of an antibody comprising an IgG1 constant domain are smaller than those comprising an IgG2.C219S constant domain. For complexes made with an IgG1 constant domain containing antibody, one of the structures frequently observed is a ring-shaped particle having a diameter between ˜220-350 Å with density branching off opposite ends of the rings on some particles (FIGS. 52A and B). The ring-shaped particles vary in their conformations from narrow ovals to circular or diamond formations. Specific selection and 2D averaging of the ring-shaped particles show they are likely to be composed of four molecules: two IgG1 and two CD73 dimers (FIGS. 52 A and B). It appears each of the CD73 monomers are bound by one of the Fab arms of the IgG1, thereby creating the ring-shaped complex when two IgG1s bind to the same two CD73 dimers. The other predominant structure that appeared in the 2D averaging of the ring-shaped particles comprising an IgG1 hinge containing antibody has a hook-shape with either one or two round densities at the tips (FIGS. 52 C and D). These structures appear to be a single IgG1 molecule with either one or two of the CD73 dimers bound to the ends of the Fab arms (FIGS. 52 C and D, respectively).

[0964] The CD73+IgG2.C219S containing antibody sample contained heterogeneous particles with tendency to make string-like formations (FIG. 52 F-J). The string-like formations can reach lengths of 1000-2000 Å and have irregular structure containing many kinks and/or bends along with branched density. Selection of all particles for 2D averaging resulted in some small structures that may be the CD73 dimer or IgG2.C219S by themselves, but more prevalent were elongated structures that appear to exist both in isolation and as building blocks of the string-like formations (FIG. 52).

### Example 24: CD73 Enzyme Inhibition in Patient Tumor Samples

[0965] CD73 enzyme activity was measured in patient tumor samples before and after administration of anti-CD73 antibody to the patients. CD73 enzymatic activity was measured as described in Example 7.

[0966] The results, which are shown in FIG. 53, indicate that the tumors obtained from patients after administration of anti-CD73 to the patients had lower levels (at least 2 fold, as determined by the percentage of CD73 positive cells or the H-score) of CD73 enzymatic activity relative to that in tumor samples from the subjects prior to the anti-CD73 antibody administration. These results suggest that administration of anti-CD73 antibody to subjects reduces the CD73 enzymatic activity in the subjects' tumors.

### Example 25: Internalization of Anti-CD73 Antibodies with Additional Constant Domain Heavy Chains

[0967] Antibodies containing a heavy chain constant region having an amino acid sequence set forth as one of SEQ ID NOs: 401-412 and 421-454 were synthesized. The description of each of these constant regions is provided in Sequence Table herein. The antibodies were synthesized with the variable regions of CD73.4.

[0968] The anti-CD73 antibodies having a heavy chain constant region comprising an amino acid sequence of SEQ ID NO: 401-412 or 421-454 were subjected to the internalization assay described in Example 4, and internalization measured at 0, 1, 4 and 21 hours.

[0969] The results, which are shown in FIGS. 54 and 55, indicate that IgG2.3-R2171 (i.e., IgG2 wild-type with R2171 and C219S mutations) provides enhanced internalization of the antibody at all 3 time points relative to an antibody with the same variable domains, but having a wild-type IgG2 constant region. The results also confirm the role of the hinge and CH1 in internalization of CD73 antibodies. The Fc regions were also shown to bind to FcRs as predicted based on the binding of the related constant regions described in the above Examples.

### Example 26: Synthesis of Additional Heavy Chain Constant Domain Mutants

[0970] As a follow up to the results described in Example 25, anti-CD73 antibodies with the heavy chain constant regions having SEQ ID NOs: 457-468 were also prepared and tested, and found to have enhanced internalization relative to a CD73 antibody having an IgG1 hinge.

### EQUIVALENTS

[0971] Those skilled in the art will recognize or be able to ascertain, using no more than routine experimentation, many equivalents of the specific embodiments described herein described herein. Such equivalents are intended to be encompassed by the following claims.

### SUMMARY OF SEQUENCE LISTING

TABLE 37

| SEQ | | |
|---|---|---|
| ID | Description | Sequence |
| 1 | Human CD73 isoform 1 | MCPRAARAPA TLLLALGAVL WPAAGAWELT |
| | | ILHTNDVHSR LEQTSEDSSK CVNASRCMGG |
| | | VARLFTKVQQ IRRAEPNVLL LDAGDQYQGT |
| | | IWFTVYKGAE VAHFMNALRY |
| | | DAMALGNHEFDNGVEGLIEP LLKEAKFPIL |
| | | SANIKAKGPL ASQISGLYLP YKVLPVGDEV |
| | | VGIVGYTSKE TPFLSNPGTN LVFEDEITAL |
| | | QPEVDKLKTL NVNKIIALGH SGFEMDKLIA |
| | | QKVRGVDVVV GGHSNTFLYT GNPPSKEVPA |
| | | GKYPFIVTSD DGRKVPVVQA YAFGKYLGYL |
| | | KIEFDERGNV ISSHGNPILL NSSIPEDPSI |
| | | KADINKWRIK LDNYSTQELG KTIVYLDGSS |
| | | QSCRFRECNM GNLICDAMIN NNLRHTDEMF |
| | | WNHVSMCILN GGGIRSPIDE RNNGTITWEN |
| | | LAAVLPFGGT FDLVQLKGST LKKAFEHSVH |
| | | RYGQSTGEFL QVGGIHVVYD LSRKPGDRVV |
| | | KLDVLCTKCRVPSYDPLKMD EVYKVILPNF |
| | | LANGGDGFQM IKDELLRHDS GDQDINVVST |
| | | YISKMKVIYP AVEGRIKFST GSHCHGSFSL |
| | | IFLSLWAVIF VLYQ |
| 2 | Human CD73 isoform 2 | MCPRAARAPA TLLLALGAVL WPAAGAWELT |
| | | ILHTNDVHSR LEQTSEDSSK |
| | | CVNASRCMGGVARLFTKVQQ IRRAEPNVLL |
| | | LDAGDQYQGT IWFTVYKGAE VAHFMNALRY |
| | | DAMALGNHEFDNGVEGLIEP LLKEAKFPIL |
| | | SANIKAKGPL ASQISGLYLP YKVLPVGDEV |
| | | VGIVGYTSKETPFLSNPGTN LVFEDEITAL |
| | | QPEVDKLKTL NVNKIIALGH SGFEMDKLIA |
| | | QKVRGVDVVVGGHSNTFLYT GNPPSKEVPA |
| | | GKYPFIVTSD DGRKVPVVQA YAFGKYLGYL |
| | | KIEFDERGNVISSHGNPILL NSSIPEDPSI |
| | | KADINKWRIK LDNYSTQELG KTIVYLDGSS |
| | | QSCRFRECNMGNLICDAMIN NNLRHTDEMF |
| | | WNHVSMCILN GGGIRSPIDE RNNGIHVVYD |
| | | LSRKPGDRVVKLDVLCTKCR VPSYDPLKMD |
| | | EVYKVILPNF LANGGDGFQM IKDELLRHDS |
| | | GDQDINVVSTYISKMKVIYP AVEGRIKFST |
| | | GSHCHGSFSL IFLSLWAVIF VLYQ |
| 3 | Cynomolgus CD73 | MCPRAARAPA TLLLAVGALL WSAAGAWELT |
| | | ILHTNDVHSR LEQTSEDSSK |
| | | CVNASRCMGGVARLFTKVQQ IRRAEPNVLL |
| | | LDAGDQYQGT IWFTVYKGAE VAHFMNALRY |
| | | DAMALGNHEFDNGVEGLIEP LLKEAKFPIL |
| | | SANIKAKGPL ASQISGLYLP YKVLPVGDEV |
| | | VGIVGYTSKETPFLSNPGTN LVFEDEITAL |
| | | QPEVDKLKTL NVNKIIALGH SGFETDKLIA |
| | | QKVRGVDVVVGGHSNTFLYT GNPPSKEVPA |
| | | GKYPFIVTSD DGRKVPVVQA YAFGKYLGYL |
| | | KIEFDERGNVISSHGNPILL NSSIPEDPSI |
| | | KADINKWRIK LDNYSTQELG KTIVYLDGSS |
| | | QSCRFRECNMGNLICDAMIN NNLRHADEMF |
| | | WNHVSMCILN GGGIRSPIDE RNNGTITWEN |
| | | LAAVLPFGGTFDLVQLKGST LKKAFEHSVH |
| | | RYGQSTGEFL QVGGIHVVYD LSRKPGDRVV |
| | | KLDVLCTKCRVPSYDPLKMD EIYKVILPNF |
| | | LANGGDGFQM IKDELLRHDS GDQDINVVST |
| | | YISKMKVIYPAVEGRIKFST GSHCHGSFSL |
| | | IFLSFCAVIF VLYQ |
| 4 | 11F11 VH | QVQLVESGGGVVQPGRSLRLSCATSGFTFSNYGMH |
| | | WVRQAPGKGLEWVAVILYDGSNKYYPDSVKGRFT |
| | | ISRDNSKNTLYLQMNSLRAEDTAVYYCARGGSSW |
| | | YPDSFDIWGQGTMVTVSS |
| 5 | 11F11 VHCDR1 | NYGMH |
| 6 | 11F11 VHCDR2 | VILYDGSNKYYPDSVKG |
| 7 | 11F11 VHCDR3 | GGSSWYPDSFDI |
| 8 | 11F11 VK1 | EIVLTQSPATLSLSPGERATLSCRASQGVSSYLAWY |
| | | QQKPGQAPRLLIYDASNRATGIPARFSGSGPGTDFT |
| | | LTISSLEPEDFAVYYCQQRSNWHLTFGGGTKVEIK |
| 9 | 11F11 VK1 CDR1 | RASQGVSSYLA |
| 10 | 11F11 VK1 CDR2 | DASNRAT |
| 11 | 11F11 VK1 CDR3 | QQRSNWHLT |
| 12 | 11F11 VK2 | DIQMTQSPSSLSASVGDRVTITCRASQGISSWLAWY |
| | | QQKPEKAPKSLIYAASSLQSGVPSRFSGSGSGTDFT |
| | | LTISSLQPEDFATYYCQQYNSYPLTFGGGTKVEIK |
| 13 | 11F11 VK2 CDR1 | RASQGISSWLA |
| 14 | 11F11 VK2 CDR2 | AASSLQS |
| 15 | 11F11 VK2 CDR3 | QQYNSYPLT |
| 16 | 4C3 VH | EVQLVESGGGLVQPGRSLRLSCAASGFTFDDYAM |
| | | HWVRQAPGKGLEWVSGISWKSGSIGYADSVKGRF |
| | | TISRDNAKNSLYLQMNSLRAEDTALYYCVKGYYVI |
| | | LTGLDYWGQGTLVTVS S |
| 17 | 4C3 VHCDR1 | DYAMH |
| 18 | 4C3 VHCDR2 | GISWKSGSIGYADSVKG |
| 19 | 4C3 VHCDR3 | GYYVILTGLDY |
| 20 | 4C3 VK1 | EIVLTQSPGTLSLSPGERATLSCRASQSVSSYLAWY |
| | | QQKPGQAPRLLIYGASSRATGIPDRFSGSGSGTDFT |
| | | LTISRLEPEDFAVYYCQQYGSSPLTFGGGTKVEIK |
| 21 | 4C3 VK1 CDR1 | RASQSVSSYLAW |
| 22 | 4C3 VK1 CDR2 | ASSRATG |
| 23 | 4C3 VK1 CDR3 | QYGSSPLT |
| 24 | 4C3 VK2 | DIQMTQSPSSLSASVGDRVTFTCRASQGISSWLAW |
| | | YQQKPEKAPKSLIYAASSLQSGVPSRFSGSGSGTDF |
| | | TLTISSLQPEDFATYYCQQYNSYPPTFGQGTKVEIK |
| 25 | 4C3 VK2 CDR1 | RASQGISSWLA |
| 26 | 4C3 VK2 CDR2 | AASSLQS |
| 27 | 4C3 VK2 CDR3 | QQYNSYPPT |
| 28 | 4C3 VK3 | DIQMTQSPSSLSASVGDRVTFTCRASQGISSWLAW |
| | | YQQKPEKAPKSLIYAASSLQSGVPSRFSGSGSGTDF |
| | | TLTISSLQPEDFATYYCQQYNSYPPTFGQGTKVEIK |
| 29 | 4C3 VK3 CDR1 | RASQGISSWLA |
| 30 | 4C3 VK3 CDR2 | AASSLQS |
| 31 | 4C3 VK3 CDR3 | QQYNSYPPT |
| 32 | 4D4 VH | QVQLVESGGGVVQPGRSLRLSCAASGFTFSNYGM |
| | | HWVRQAPGKGLEWVAVIWYDESNKYYADSVKGR |
| | | FTISRDNSKNTLFLQMNSLRAEDTAVYYCARGYNS |
| | | RWYPDAFDIWGQGTMVT VSS |
| 33 | 4D4 VHCDR1 | NYGMH |
| 34 | 4D4 VHCDR2 | VIWYDESNKYYADSVKG |
| 35 | 4D4 VHCDR3 | GYNSRWYPDAFDI |
| 36 | 4D4 VK1 | DIQMTQSPSSLSASVGDRVTITCRASQGISSWLAWY |
| | | QQKPEKAPKSLIYAASSLQSGVPSRFSGSGSGTDFT |
| | | LTISSLQPEDFATYYCQQYNSYPLTFGGGTKVEIK |
| 37 | 4D4 VK1 CDR1 | RASQGISSWLA |
| 38 | 4D4 VK1 CDR2 | AASSLQS |
| 39 | 4D4 VK1 CDR3 | QQYNSYPLT |
| 40 | 10D2 VH1 | QVQLVESGGGVVQPGRSLRLSCAASGFTFSNYGLH |
| | | WVRQAPGKGLEWVAVIRYDGSNKYYADSVKGRF |
| | | TISRDNSKNTLYLQMSSLRAEDTAVYYCARGGSSW |
| | | YPDGLDVWGQGTTVTV SS |
| 41 | 10D2 VH1 CDR1 | NYGLH |
| 42 | 10D2 VH1 CDR2 | VIRYDGSNKYYADSVKG |
| 43 | 10D2 VH1 CDR3 | GGSSWYPDGLDV |
| 44 | 10D2 VK1 | AIQLTQSPSSLSASVGDRVTITCRASQGISSALAWY |
| | | QQKPGKAPKLLIYDASSLESGVPSRFSGSGSGTDFT |
| | | LTISSLQPEDFATYYCQQFNSYPTFGGGTKVEIK |
| 45 | 10D2 VK1 CDR1 | RASQGISSALA |
| 46 | 10D2 VK1 CDR2 | DASSLES |
| 47 | 10D2 VK1 CDR3 | QQFNSYPT |
| 48 | 10D2 VK2 | DIQMTQSPSSLSASVGDRVTITCRASQGISSWLAWY |
| | | QQKPEKAPKSLIYAASSLQSGVPSRFSGSGSGTDFT |
| | | LTISSLQPEDFATYYCQQYNSYPLTFGGGTKVEIK |
| 49 | 10D2 VK2 CDR1 | RASQGISSWLA |
| 50 | 10D2 VK2 CDR2 | AASSLQS |
| 51 | 10D2 VK2 CDR3 | QQYNSYPLT |
| 52 | 11A6 VH | EVQLVESGGNLVQPGRSLRLSCAASGFTFDDYAM |
| | | HWVRQAPGKGLEWVSGISWNNNDIGYADSVKGRF |
| | | IISRDNAKNSLYLQMNSLRPEDTALYYCVKGYYVI |
| | | LTGLDYWGQGTPVTVS S |
| 53 | 11A6 VHCDR1 | DYAMH |
| 54 | 11A6 VHCDR2 | GISWNNNDIGYADSVKG |
| 55 | 11A6 VHCDR3 | GYYVILTGLDY |
| 56 | 11A6 VK1 | DIQMTQSPSSLSASVGDRVTITCRASQGISSWLAWY |
| | | QQKPEKAPKSLIYAASSLQSGVPSRFSGSGSGTDFT |
| | | LTISSLQPEDFATYYCQQYNSYPLTFGGGTKVEIK |
| 57 | 11A6 VK1 CDR1 | RASQGISSWLA |
| 58 | 11A6 VK1 CDR2 | AASSLQS |
| 59 | 11A6 VK1 CDR3 | QQYNSYPLT |
| 60 | 24H2 VH | QVQLVESGGGVVQPGRSLRLSCAASGFTFSNYGM |
| | | HWVRQAPGKGLEWVAVIWYDGGNKYYADSVKG |
| | | RFTISRDNSKNTLFLQMNSLRAEDTAVYYCARGGS |
| | | SWYPDAFDIWGQGTMVTV SS |
| 61 | 24H2 VHCDR1 | NYGMH |
| 62 | 24H2 VHCDR2 | VIWYDGGNKYYADSVKG |
| 63 | 24H2 VHCDR3 | GGSSWYPDAFDI |
| 64 | 24H2 VK1 | DIQMTQSPSSLSASVGDRVTITCRASQGISSWLAWY |
| | | QQKPEKAPKSLIYAASSLQSGVPSRFSGSGSGTDFT |
| | | LTISSLQPEDFATYYCQQYNSYPLTFGGGTKVEIK |
| 65 | 24H2 VK1 CDR1 | RASQGISSWLA |
| 66 | 24H2 VK1 CDR2 | AASSLQS |
| 67 | 24H2 VK1 CDR3 | QQYNSYPLT |
| 68 | 5F8 VH | EVQLVESGGGLVQPGGSLRLSCAASGFTFSSYWMH |
| | | WVRQAPGKGLVWVSRIISDGSSTGYADSVKGRFTI |
| | | SRDNAKNTLYLQMNSLRAEDTAVYYCAREFSSGW |
| | | YFDYWGQGTLVTVSS |
| 69 | 5F8 VHCDR1 | SYWMH |
| 70 | 5F8 VHCDR2 | RIISDGSSTGYADSVKG |
| 71 | 5F8 VHCDR3 | EFSSGWYFDY |
| 72 | 5F8 VK1 | AIQLTQSPSSLSASVGDRVTITCRASQGISSALAWY |
| | | QQKPGKAPKLLIYDASSLESGVPSRFSGSGSGTDFT |
| | | LTISSLQPEDFATYYCQQFSSYPRTFGQGTKVEIK |
| 73 | 5F8 VK1 CDR1 | RASQGISSALA |
| 74 | 5F8 VK1 CDR2 | DASSLES |
| 75 | 5F8 VK1 CDR3 | QQFSSYPRT |
| 76 | 5F8 VK2 | DIQMTQSPSSLSASVGDRVTITCRASQGISSWLAWY |
| | | QQKPEKAPKSLIYAASSLQSGVPSRFSGSGSGTGFT |
| | | LTISSLQPEDFATYYCQQYNSYPRTFGQGTKVEIK |
| 77 | 5F8 VK2 CDR1 | RASQGISSWLA |
| 78 | 5F8 VK2 CDR2 | AASSLQS |
| 79 | 5F8 VK2 CDR3 | QQYNSYPRT |
| 80 | 6E11 VH | EVQLVESGGALVQPGRSLRLSCAASGFTFDDYAM |
| | | HWVRQAPGKGLEWVSGITWNSGGIGYADSVKGRF |
| | | TISRDNAKNSLYLQMNSLRAEDTALYYCAKDRYY |
| | | SSWLLFDNWGQGILVTV SS |
| 81 | 6E11 VHCDR1 | DYAMH |
| 82 | 6E11 VHCDR2 | GITWNSGGIGYADSVKG |
| 83 | 6E11 VHCDR3 | DRYYSSWLLFDN |
| 84 | 6E11 VK1 | EIVLTQSPGTLSLSPGERATLSCRASQSVSSSYLAW |
| | | YQQKPGQAPRLLIYGASSRATGIPDRFSGSGSGTDF |
| | | TLTISRLEPEDFAVYYCQHYGSSFTFGPGTKVDIK |
| 85 | 6E11 VK1 CDR1 | RASQSVSSSYLA |
| 86 | 6E11 VK1 CDR2 | GASSRAT |
| 87 | 6E11 VK1 CDR3 | QHYGSSFT |
| 88 | 7A11 VH | EVQLVESGGGLVQTGRSLRLSCAASGFTFDDYAM |
| | | HWVRQAPGKGLEWVSDISWNSDIIGYADSVKGRF |
| | | TISRDNAKNSLYLQMNSLRAEDTALYYCAKDIYGS |
| | | GSSFFDYWGQGILVTV SS |
| 89 | 7A11 VHCDR1 | DYAMH |
| 90 | 7A11 VHCDR2 | DISWNSDIIGYADSVKG |
| 91 | 7A11 VHCDR3 | DIYGSGSSFFDY |
| 92 | 7A11 VK1 | DIQMTQSPSSLSASVGDRVTITCRASQYISSWLAWY |
| | | QQKPEKAPKSLIYAASSLQSGVPSRFSGSGSGTDFT |
| | | LTISSLQPEDFATYYCQQYHSYPPTFGQGTRLEIK |
| 93 | 7A11 VK1 CDR1 | RASQYISSWLA |
| 94 | 7A11 VK1 CDR2 | AASSLQS |
| 95 | 7A11 VK1 CDR3 | QQYHSYPPT |
| 96 | 11F11 epitope #1 | FTKVQQIRRAEPNVLLLDA |
| 97 | 11F11 epitope #2 | LYLPYKVLPVGDEVVG |
| 98 | Wildtype IgG1 CH1 | ASTKGPSVFPLAPSSKSTSGGTAALGCLVKDYFPEP |
| | | VTVSWNSGALTSGVHTFPAVLQSSGLYSLSSVVTV |
| | | PSSSLGTQTYICNVNHKPSNTKVDKKV |
| 99 | His-tagged CD73 | MCPRAARAPATLLLALGAVLWPAAGAWELTILHT |
| | | NDVHSRLEQTSEDSSKCVNASRCMGGVARLFTKV |
| | | QQIRRAEPNVLLLDAGDQYQGTIWFTVYKGAEVA |
| | | HFMNALRYDAMALGNHEFDNGVEGLIEPLLKEAK |
| | | FPILSANIKAKGPLASQISGLYLPYKVLPVGDEVVGI |
| | | VGYTSKETPFLSNPGTNLVFEDEITALQPEVDKLKT |
| | | LNVNKIIALGHSGFEMDKLIAQKVRGVDVVVGGHS |
| | | NTFLYTGNPPSKEVPAGKYPFIVTSDDGRKVPVVQ |
| | | AYAFGKYLGYLKIEFDERGNVISSHGNPILLNSSIPE |
| | | DPSIKADINKWRIKLDNYSTQELGKTIVYLDGSSQS |
| | | CRFRECNMGNLICDAMINNNLRHADETFWNHVSM |
| | | CILNGGGIRSPIDERNNGTITWENLAAVLPFGGTFD |
| | | LVQLKGSTLKKAFEHSVHRYGQSTGEFLQVGGIHV |
| | | VYDLSRKPGDRVVKLDVLCTKCRVPSYDPLKMDE |
| | | VYKVILPNFLANGGDGFQMIKDELLRHDSGDQDIN |
| | | VVSTYISKMKVIYPAVEGRIKHHHHHH |
| 100 | 11F11 (full length heavy chain) | QVQLVESGGGVVQPGRSLRLSCATSGFTFSNYGMH |
| | | WVRQAPGKGLEWVAVILYDGSNKYYPDSVKGRFT |
| | | ISRDNSKNTLYLQMNSLRAEDTAVYYCARGGSSW |
| | | YPDSFDIWGQGTMVTVSSASTKGPSVFPLAPCSRST |
| | | SESTAALGCLVKDYFPEPVTVSWNSGALTSGVHTF |
| | | PAVLQSSGLYSLSSVVTVPSSNFGTQTYTCNVDHK |
| | | PSNTKVDKTVERKCCVECPPCPAPPVAGPSVFLFPP |
| | | KPKDTLMISRTPEVTCVVVDVSHEDPEVQFNWYV |
| | | DGVEVHNAKTKPREEQFNSTFRVVSVLTVVHQDW |
| | | LNGKEYKCKVSNKGLPAPIEKTISKTKGQPREPQV |
| | | YTLPPSREEMTKNQVSLTCLVKGFYPSDIAVEWES |
| | | NGQPENNYKTTPPMLDSDGSFFLYSKLTVDKSRW |
| | | QQGNVFSCSVMHEALHNHYTQKSLSLSPGK |
| 101 | 11F11 (full length light chain 1) | EIVLTQSPATLSLSPGERATLSCRASQGVSSYLAWY |
| | | QQKPGQAPRLLIYDASNRATGIPARFSGSGPGTDFT |
| | | LTISSLEPEDFAVYYCQQRSNWHLTFGGGTKVEIKR |
| | | TVAAPSVFIFPPSDEQLKSGTASVVCLLNNFYPREA |
| | | KVQWKVDNALQSGNSQESVTEQDSKDSTYSLSSTL |
| | | TLSKADYEKHKVYACEVTHQGLSSPVTKSFNRGEC |
| 102 | 11F11 (full length light chain 2) | DIQMTQSPSSLSASVGDRVTITCRASQGISSWLAWY |
| | | QQKPEKAPKSLIYAASSLQSGVPSRFSGSGSGTDFT |
| | | LTISSLQPEDFATYYCQQYNSYPLTFGGGTKVEIKR |
| | | TVAAPSVFIFPPSDEQLKSGTASVVCLLNNFYPREA |
| | | KVQWKVDNALQSGNSQESVTEQDSKDSTYSLSSTL |
| | | TLSKADYEKHKVYACEVTHQGLSSPVTKSFNRGEC |
| 103 | 4C3 (full length heavy chain) | EVQLVESGGGLVQPGRSLRLSCAASGFTFDDYAM |
| | | HWVRQAPGKGLEWVSGISWKSGSIGYADSVKGRF |
| | | TISRDNAKNSLYLQMNSLRAEDTALYYCVKGYYVI |
| | | LTGLDYWGQGTLVTVSSASTKGPSVFPLAPSSKSTS |
| | | GGTAALGCLVKDYFPEPVTVSWNSGALTSGVHTFP |
| | | AVLQSSGLYSLSSVVTVPSSSLGTQTYICNVNHKPS |
| | | NTKVDKKVEPKSCDKTHTCPPCPAPELLGGPSVFLF |
| | | PPKPKDTLMISRTPEVTCVVVDVSHEDPEVKFNWY |
| | | VDGVEVHNAKTKPREEQYNSTYRVVSVLTVLHQD |
| | | WLNGKEYKCKVSNKALPAPIEKTISKAKGQPREPQ |
| | | VYTLPPSRDELTKNQVSLTCLVKGFYPSDIAVEWES |
| | | NGQPENNYKTTPPVLDSDGSFFLYSKLTVDKSRWQ |
| | | QGNVFSCSVMHEALHNHYTQKSLSLSPGK |
| 104 | 4C3 (full length light chain 1) | EIVLTQSPGTLSLSPGERATLSCRASQSVSSYLAWY |
| | | QQKPGQAPRLLIYGASSRATGIPDRFSGSGSGTDFT |
| | | LTISRLEPEDFAVYYCQQYGSSPLTFGGGTKVEIKR |
| | | TVAAPSVFIFPPSDEQLKSGTASVVCLLNNFYPREA |
| | | KVQWKVDNALQSGNSQESVTEQDSKDSTYSLSSTL |
| | | TLSKADYEKHKVYACEVTHQGLSSPVTKSFNRGEC |
| 105 | 4C3 (full length light chain 2) | DIQMTQSPSSLSASVGDRVTFTCRASQGISSWLAW |
| | | YQQKPEKAPKSLIYAASSLQSGVPSRFSGSGSGTDF |
| | | TLTISSLQPEDFATYYCQQYNSYPPTFGQGTKVEIK |
| | | RTVAAPSVFIFPPSDEQLKSGTASVVCLLNNFYPRE |
| | | AKVQWKVDNALQSGNSQESVTEQDSKDSTYSLSS |
| | | TLTLSKADYEKHKVYACEVTHQGLSSPVTKSFNRG |
| | | EC |
| 106 | 4C3 (full length light chain 3) | DIQMTQSPSSLSASVGDRVTFTCRASQGISSWLAW |
| | | YQQKPEKAPKSLIYAASSLQSGVPSRFSGSGSGTDF |
| | | TLTISSLQPEDFATYYCQQYNSYPPTFGQGTKVEIK |
| | | RTVAAPSVFIFPPSDEQLKSGTASVVCLLNNFYPRE |
| | | AKVQWKVDNALQSGNSQESVTEQDSKDSTYSLSS |
| | | TLTLSKADYEKHKVYACEVTHQGLSSPVTKSFNRG |
| | | EC |
| 107 | 4D4 (full length heavy chain) | QVQLVESGGGVVQPGRSLRLSCAASGFTFSNYGM |
| | | HWVRQAPGKGLEWVAVIWYDESNKYYADSVKGR |
| | | FTISRDNSKNTLFLQMNSLRAEDTAVYYCARGYNS |
| | | RWYPDAFDIWGQGTMVTVSSASTKGPSVFPLAPCS |
| | | RSTSESTAALGCLVKDYFPEPVTVSWNSGALTSGV |
| | | HTFPAVLQSSGLYSLSSVVTVPSSNFGTQTYTCNVD |
| | | HKPSNTKVDKTVERKCCVECPPCPAPPVAGPSVFL |
| | | FPPKPKDTLMISRTPEVTCVVVDVSHEDPEVQFNW |
| | | YVDGVEVHNAKTKPREEQFNSTFRVVSVLTVVHQ |
| | | DWLNGKEYKCKVSNKGLPAPIEKTISKTKGQPREP |
| | | QVYTLPPSREEMTKNQVSLTCLVKGFYPSDIAVEW |
| | | ESNGQPENNYKTTPPMLDSDGSFFLYSKLTVDKSR |
| | | WQQGNVFSCSVMHEALHNHYTQKSLSLSPGK |
| 108 | 4D4 (full length light chain 1) | DIQMTQSPSSLSASVGDRVTITCRASQGISSWLAWY |
| | | QQKPEKAPKSLIYAASSLQSGVPSRFSGSGSGTDFT |
| | | LTISSLQPEDFATYYCQQYNSYPLTFGGGTKVEIKR |
| | | TVAAPSVFIFPPSDEQLKSGTASVVCLLNNFYPREA |
| | | KVQWKVDNALQSGNSQESVTEQDSKDSTYSLSSTL |
| | | TLSKADYEKHKVYACEVTHQGLSSPVTKSFNRGEC |
| 109 | 10D2 (full length heavy chain) | QVQLVESGGGVVQPGRSLRLSCAASGFTFSNYGLH |
| | | WVRQAPGKGLEWVAVIRYDGSNKYYADSVKGRF |
| | | TISRDNSKNTLYLQMSSLRAEDTAVYYCARGGSSW |
| | | YPDGLDVWGQGTTVTVSSASTKGPSVFPLAPCSRS |
| | | TSESTAALGCLVKDYFPEPVTVSWNSGALTSGVHT |
| | | FPAVLQSSGLYSLSSVVTVPSSSLGTKTYTCNVDHK |
| | | PSNTKVDKRVESKYGPPCPSCPAPEFLGGPSVFLFP |
| | | PKPKDTLMISRTPEVTCVVVDVSQEDPEVQFNWYV |
| | | DGVEVHNAKTKPREEQFNSTYRVVSVLTVLHQDW |
| | | LNGKEYKCKVSNKGLPSSIEKTISKAKGQPREPQVY |
| | | TLPPSQEEMTKNQVSLTCLVKGFYPSDIAVEWESN |
| | | GQPENNYKTTPPVLDSDGSFFLYSRLTVDKSRWQE |
| | | GNVFSCSVMHEALHNHYTQKSLSLSLGK |
| 110 | 10D2 (full length light chain 1) | AIQLTQSPSSLSASVGDRVTITCRASQGISSALAWY |
| | | QQKPGKAPKLLIYDASSLESGVPSRFSGSGSGTDFT |
| | | LTISSLQPEDFATYYCQQFNSYPTFGGGTKVEIKRT |
| | | VAAPSVFIFPPSDEQLKSGTASVVCLLNNFYPREAK |
| | | VQWKVDNALQSGNSQESVTEQDSKDSTYSLSSTLT |
| | | LSKADYEKHKVYACEVTHQGLSSPVTKSFNRGEC |
| 111 | 10D2 (full length light chain 2) | DIQMTQSPSSLSASVGDRVTITCRASQGISSWLAWY |
| | | QQKPEKAPKSLIYAASSLQSGVPSRFSGSGSGTDFT |
| | | LTISSLQPEDFATYYCQQYNSYPLTFGGGTKVEIKR |
| | | TVAAPSVFIFPPSDEQLKSGTASVVCLLNNFYPREA |
| | | KVQWKVDNALQSGNSQESVTEQDSKDSTYSLSSTL |
| | | TLSKADYEKHKVYACEVTHQGLSSPVTKSFNRGEC |
| 112 | 11A6 (full length heavy chain) | EVQLVESGGNLVQPGRSLRLSCAASGFTFDDYAM |
| | | HWVRQAPGKGLEWVSGISWNNNDIGYADSVKGRF |
| | | IISRDNAKNSLYLQMNSLRPEDTALYYCVKGYYVI |
| | | LTGLDYWGQGTPVTVSSASTKGPSVFPLAPSSKSTS |
| | | GGTAALGCLVKDYFPEPVTVSWNSGALTSGVHTFP |
| | | AVLQSSGLYSLSSVVTVPSSSLGTQTYICNVNHKPS |
| | | NTKVDKKVEPKSCDKTHTCPPCPAPELLGGPSVFLF |
| | | PPKPKDTLMISRTPEVTCVVVDVSHEDPEVKFNWY |
| | | VDGVEVHNAKTKPREEQYNSTYRVVSVLTVLHQD |
| | | WLNGKEYKCKVSNKALPAPIEKTISKAKGQPREPQ |
| | | VYTLPPSRDELTKNQVSLTCLVKGFYPSDIAVEWES |
| | | NGQPENNYKTTPPVLDSDGSFFLYSKLTVDKSRWQ |
| | | QGNVFSCSVMHEALHNHYTQKSLSLSPGK |
| 113 | 11A6 (full length light chain 1) | DIQMTQSPSSLSASVGDRVTITCRASQGISSWLAWY |
| | | QQKPEKAPKSLIYAASSLQSGVPSRFSGSGSGTDFT |
| | | LTISSLQPEDFATYYCQQYNSYPLTFGGGTKVEIKR |
| | | TVAAPSVFIFPPSDEQLKSGTASVVCLLNNFYPREA |
| | | KVQWKVDNALQSGNSQESVTEQDSKDSTYSLSSTL |
| | | TLSKADYEKHKVYACEVTHQGLSSPVTKSFNRGEC |
| 114 | 24H2 (full length heavy chain) | QVQLVESGGGVVQPGRSLRLSCAASGFTFSNYGM |
| | | HWVRQAPGKGLEWVAVIWYDGGNKYYADSVKG |
| | | RFTISRDNSKNTLFLQMNSLRAEDTAVYYCARGGS |
| | | SWYPDAFDIWGQGTMVTVSSASTKGPSVFPLAPCS |
| | | RSTSESTAALGCLVKDYFPEPVTVSWNSGALTSGV |
| | | HTFPAVLQSSGLYSLSSVVTVPSSSLGTKTYTCNVD |
| | | HKPSNTKVDKRVESKYGPPCPSCPAPEFLGGPSVFL |
| | | FPPKPKDTLMISRTPEVTCVVVDVSQEDPEVQFNW |
| | | YVDGVEVHNAKTKPREEQFNSTYRVVSVLTVLHQ |
| | | DWLNGKEYKCKVSNKGLPSSIEKTISKAKGQPREP |
| | | QVYTLPPSQEEMTKNQVSLTCLVKGFYPSDIAVEW |
| | | ESNGQPENNYKTTPPVLDSDGSFFLYSRLTVDKSR |
| | | WQEGNVFSCSVMHEALHNHYTQKSLSLSLGK |
| 115 | 24H2 (full length light chain 1) | DIQMTQSPSSLSASVGDRVTITCRASQGISSWLAWY |
| | | QQKPEKAPKSLIYAASSLQSGVPSRFSGSGSGTDFT |
| | | LTISSLQPEDFATYYCQQYNSYPLTFGGGTKVEIKR |
| | | TVAAPSVFIFPPSDEQLKSGTASVVCLLNNFYPREA |
| | | KVQWKVDNALQSGNSQESVTEQDSKDSTYSLSSTL |
| | | TLSKADYEKHKVYACEVTHQGLSSPVTKSFNRGEC |
| 116 | 5F8 (full length heavy chain) | EVQLVESGGGLVQPGGSLRLSCAASGFTFSSYWMH |
| | | WVRQAPGKGLVWVSRIISDGSSTGYADSVKGRFTI |
| | | SRDNAKNTLYLQMNSLRAEDTAVYYCAREFSSGW |
| | | YFDYWGQGTLVTVSSASTKGPSVFPLAPSSKSTSG |
| | | GTAALGCLVKDYFPEPVTVSWNSGALTSGVHTFPA |
| | | VLQSSGLYSLSSVVTVPSSSLGTQTYICNVNHKPSN |
| | | TKVDKKVEPKSCDKTHTCPPCPAPELLGGPSVFLFP |
| | | PKPKDTLMISRTPEVTCVVVDVSHEDPEVKFNWYV |
| | | DGVEVHNAKTKPREEQYNSTYRVVSVLTVLHQDW |
| | | LNGKEYKCKVSNKALPAPIEKTISKAKGQPREPQV |
| | | YTLPPSRDELTKNQVSLTCLVKGFYPSDIAVEWESN |
| | | GQPENNYKTTPPVLDSDGSFFLYSKLTVDKSRWQQ |
| | | GNVFSCSVMHEALHNHYTQKSLSLSPGK |
| 117 | 5F8 (full length light chain 1) | AIQLTQSPSSLSASVGDRVTITCRASQGISSALAWY |
| | | QQKPGKAPKLLIYDASSLESGVPSRFSGSGSGTDFT |
| | | LTISSLQPEDFATYYCQQFSSYPRTFGQGTKVEIKRT |
| | | VAAPSVFIFPPSDEQLKSGTASVVCLLNNFYPREAK |
| | | VQWKVDNALQSGNSQESVTEQDSKDSTYSLSSTLT |
| | | LSKADYEKHKVYACEVTHQGLSSPVTKSFNRGEC |
| 118 | 5F8 (full length light chain 2) | DIQMTQSPSSLSASVGDRVTITCRASQGISSWLAWY |
| | | QQKPEKAPKSLIYAASSLQSGVPSRFSGSGSGTGFT |
| | | LTISSLQPEDFATYYCQQYNSYPRTFGQGTKVEIKR |
| | | TVAAPSVFIFPPSDEQLKSGTASVVCLLNNFYPREA |
| | | KVQWKVDNALQSGNSQESVTEQDSKDSTYSLSSTL |
| | | TLSKADYEKHKVYACEVTHQGLSSPVTKSFNRGEC |
| 119 | 6E11 (full length heavy chain) | EVQLVESGGALVQPGRSLRLSCAASGFTFDDYAM |
| | | HWVRQAPGKGLEWVSGITWNSGGIGYADSVKGRF |
| | | TISRDNAKNSLYLQMNSLRAEDTALYYCAKDRYY |
| | | SSWLLFDNWGQGILVTVSSASTKGPSVFPLAPSSKS |
| | | TSGGTAALGCLVKDYFPEPVTVSWNSGALTSGVHT |
| | | FPAVLQSSGLYSLSSVVTVPSSSLGTQTYICNVNHK |
| | | PSNTKVDKKVEPKSCDKTHTCPPCPAPELLGGPSVF |
| | | LFPPKPKDTLMISRTPEVTCVVVDVSHEDPEVKFN |
| | | WYVDGVEVHNAKTKPREEQYNSTYRVVSVLTVLH |
| | | QDWLNGKEYKCKVSNKALPAPIEKTISKAKGQPRE |
| | | PQVYTLPPSRDELTKNQVSLTCLVKGFYPSDIAVE |
| | | WESNGQPENNYKTTPPVLDSDGSFFLYSKLTVDKS |
| | | RWQQGNVFSCSVMHEALHNHYTQKSLSLSPGK |
| 120 | 6E11 (full length light chain 1) | EIVLTQSPGTLSLSPGERATLSCRASQSVSSSYLAW |
| | | YQQKPGQAPRLLIYGASSRATGIPDRFSGSGSGTDF |
| | | TLTISRLEPEDFAVYYCQHYGSSFTFGPGTKVDIKR |
| | | TVAAPSVFIFPPSDEQLKSGTASVVCLLNNFYPREA |
| | | KVQWKVDNALQSGNSQESVTEQDSKDSTYSLSSTL |
| | | TLSKADYEKHKVYACEVTHQGLSSPVTKSFNRGEC |
| 121 | 7A11 (full length heavy chain) | EVQLVESGGGLVQTGRSLRLSCAASGFTFDDYAM |
| | | HWVRQAPGKGLEWVSDISWNSDIIGYADSVKGRF |
| | | TISRDNAKNSLYLQMNSLRAEDTALYYCAKDIYGS |
| | | GSSFFDYWGQGILVTVSSASTKGPSVFPLAPSSKST |
| | | SGGTAALGCLVKDYFPEPVTVSWNSGALTSGVHTF |
| | | PAVLQSSGLYSLSSVVTVPSSSLGTQTYICNVNHKP |
| | | SNTKVDKKVEPKSCDKTHTCPPCPAPELLGGPSVFL |
| | | FPPKPKDTLMISRTPEVTCVVVDVSHEDPEVKFNW |
| | | YVDGVEVHNAKTKPREEQYNSTYRVVSVLTVLHQ |
| | | DWLNGKEYKCKVSNKALPAPIEKTISKAKGQPREP |
| | | QVYTLPPSRDELTKNQVSLTCLVKGFYPSDIAVEW |
| | | ESNGQPENNYKTTPPVLDSDGSFFLYSKLTVDKSR |
| | | WQQGNVFSCSVMHEALHNHYTQKSLSLSPGK |
| 122 | 7A11 (full length light chain 1) | DIQMTQSPSSLSASVGDRVTITCRASQYISSWLAWY |
| | | QQKPEKAPKSLIYAASSLQSGVPSRFSGSGSGTDFT |
| | | LTISSLQPEDFATYYCQQYHSYPPTFGQGTRLEIKR |
| | | TVAAPSVFIFPPSDEQLKSGTASVVCLLNNFYPREA |
| | | KVQWKVDNALQSGNSQESVTEQDSKDSTYSLSSTL |
| | | TLSKADYEKHKVYACEVTHQGLSSPVTKSFNRGEC |
| 123 | Hinge C219S | ERKSCVECPPCPAPPVAG |
| 124 | IgG2 CH1 (wildtype) | ASTKGPSVFPLAPCSRSTSESTAALGCLVKDYFPEP |
| | | VTVSWNSGALTSGVHTFPAVLQSSGLYSLSSVVTV |
| | | PSSNFGTQTYTCNVDHKPSNTKVDKTV |
| 125 | IgG1 CH2 + A330S and P331S | PSVFLFPPKPKDTLMISRTPEVTCVVVDVSHEDPEV |
| | | KFNWYVDGVEVHNAKTKPREEQYNSTYRVVSVLT |
| | | VLHQDWLNGKEYKCKVSNKALPSSIEKTISKAK |
| 126 | Human IgG1 constant region | ASTKGPSVFPLAPSSKSTSGGTAALGCLVKDYFPEP |
| | | VTVSWNSGALTSGVHTFPAVLQSSGLYSLSSVVTV |
| | | PSSSLGTQTYICNVNHKPSNTKVDKKVEPKSCDKT |
| | | HTCPPCPAPELLGGPSVFLFPPKPKDTLMISRTPEVT |
| | | CVVVDVSHEDPEVKFNWYVDGVEVHNAKTKPRE |
| | | EQYNSTYRVVSVLTVLHQDWLNGKEYKCKVSNK |
| | | ALPAPIEKTISKAKGQPREPQVYTLPPSRDELTKNQ |
| | | VSLTCLVKGFYPSDIAVEWESNGQPENNYKTTPPV |
| | | LDSDGSFFLYSKLTVDKSRWQQGNVFSCSVMHEA |
| | | LHNHYTQKSLSLSPGK |
| 127 | Human IgG1 constant region (allotype | ASTKGPSVFPLAPSSKSTSGGTAALGCLVKDYFPEP |
| | variant) | VTVSWNSGALTSGVHTFPAVLQSSGLYSLSSVVTV |
| | | PSSSLGTQTYICNVNHKPSNTKVDKKVEPKSCDKT |
| | | HTCPPCPAPELLGGPSVFLFPPKPKDTLMISRTPEVT |
| | | CVVVDVSHEDPEVKFNWYVDGVEVHNAKTKPRE |
| | | EQYNSTYRVVSVLTVLHQDWLNGKEYKCKVSNK |
| | | ALPAPIEKTISKAKGQPREPQVYTLPPSREEMTKNQ |
| | | VSLTCLVKGFYPSDIAVEWESNGQPENNYKTTPPV |
| | | LDSDGSFFLYSKLTVDKSRWQQGNVFSCSVMHEA |
| | | LHNHYTQKSLSLSPGK |
| 128 | IgG1 CH3 + E356 and M358 | GQPREPQVYTLPPSREEMTKNQVSLTCLVKGFYPS |
| | | DIAVEWESNGQPENNYKTTPPVLDSDGSFFLYSKL |
| | | TVDKSRWQQGNVFSCSVMHEALHNHYTQKSLSLS |
| | | PGK |
| 129 | IgG1 constant region | ASTKGPSVFPLAPSSKSTSGGTAALGCLVKDYFPEP |
| | | VTVSWNSGALTSGVHTFPAVLQSSGLYSLSSVVTV |
| | | PSSSLGTQTYICNVNHKPSNTKVDKKVEPKSCDKT |
| | | HTCPPCPAPELLGGPSVFLFPPKPKDTLMISRTPEVT |
| | | CVVVDVSHEDPEVKFNWYVDGVEVHNAKTKPRE |
| | | EQYNSTYRVVSVLTVLHQDWLNGKEYKCKVSNK |
| | | ALPAPIEKTISKAKGQPREPQVYTLPPSRDELTKNQ |
| | | VSLTCLVKGFYPSDIAVEWESNGQPENNYKTTPPV |
| | | LDSDGSFFLYSKLTVDKSRWQQGNVFSCSVMHEA |
| | | LHNHYTQKSLSLSPGK |
| 130 | IgG2 constant region | ASTKGPSVFP LAPCSRSTSE STAALGCLVK |
| | | DYFPEPVTVS WNSGALTSGV HTFPAVLQSS |
| | | GLYSLSSVVT VPSSNFGTQT YTCNVDHKPS |
| | | NTKVDKTVER KCCVECP PCPAPPVAG |
| | | PSVFLFPPKP KDTLMISRTP EVTCVVVDVS |
| | | HEDPEVQFNW YVDGVEVHNA KTKPREEQFN |
| | | STFRVVSVLT VVHQDWLNGK EYKCKVSNKG |
| | | LPAPIEKTIS KTKGQPREPQ VYTLPPSREE |
| | | MTKNQVSLTC LVKGFYPSDI AVEWESNGQP |
| | | ENNYKTTPPM LDSDGSFFLY SKLTVDKSRW |
| | | QQGNVFSCSV MHEALHNHYT QKSLSLSPGK |
| 131 | Human IgG1 kappa light chain (CL) | RTV AAPSVFIFPP SDEQLKSGTA SVVCLLNNFY |
| | | PREAKVQWKV DNALQSGNSQ ESVTEQDSKD |
| | | STYSLSSTLT LSKADYEKHK VYACEVTHQG |
| | | LSSPVTKSFN RGEC |
| 132 | Heavy chain C-terminus | LSPGK |
| 133 | CD73.4-IgG2CS-IgG1.1f, AA sequence | QVQLVESGGGVVQPGRSLRLSCAASGFTFSNYGM |
| | | HWVRQAPGKGLEWVAVILYDGSNKYYPDSVKGR |
| | | FTISRDNSKNTLYLQMNSLRAEDTAVYYCARGGSS |
| | | WYPDSFDIWGQGTMVTVSSASTKGPSVFPLAPCSR |
| | | STSESTAALGCLVKDYFPEPVTVSWNSGALTSGVH |
| | | TFPAVLQSSGLYSLSSVVTVPSSNFGTQTYTCNVDH |
| | | KPSNTKVDKTVERKSCVECPPCPAPPVAGPSVFLFP |
| | | PKPKDTLMISRTPEVTCVVVDVSHEDPEVKFNWYV |
| | | DGVEVHNAKTKPREEQYNSTYRVVSVLTVLHQDW |
| | | LNGKEYKCKVSNKALPSSIEKTISKAKGQPREPQVY |
| | | TLPPSREEMTKNQVSLTCLVKGFYPSDIAVEWESN |
| | | GQPENNYKTTPPVLDSDGSFFLYSKLTVDKSRWQQ |
| | | GNVFSCSVMHEALHNHYTQKSLSLSPGK |
| 134 | CD73.4-IgG2CS-IgG1.1f, NT sequence | caggtgcagctggtggagtctgggggaggcgtggtccagcctgggaggtcc |
| | | ctgagactctcctgtgcagcctctggattcaccttcagtaactatggcatgcactg |
| | | ggtccgccaggctccaggcaaggggctggagtgggtggcagttatattgtatga |
| | | tggaagtaataaatactatccagactccgtgaagggccgattcaccatctccaga |
| | | gacaattccaagaacacgctgtatctgcaaatgaacagcctgagagccgagga |
| | | cacggctgtgtattactgtgcgagagggggcagcagctggtaccctgattcttttg |
| | | atatctggggccaaggaacaatggtcaccgtctcttcagcgtcgaccaagggcc |
| | | catcggtcttccccctggcgccctgctccaggagcacctccgagagcacagcg |
| | | gccctgggctgcctggtcaaggactacttccccgaaccggtgacggtgtcgtgg |
| | | aactcaggcgctctgaccagcggcgtgcacaccttcccagctgtcctacagtcct |
| | | caggactctactccctcagcagcgtggtgaccgtgccctccagcaacttcggca |
| | | cccagacctacacctgcaacgtagatcacaagcccagcaacaccaaggtggac |
| | | aagacagttgagcgcaaatcctgtgtcgagtgcccaccgtgcccagcaccacct |
| | | gtggcaggaccgtcagtcttcctcttccccccaaaacccaaggacaccctcatg |
| | | atctcccggacccctgaggtcacatgcgtggtggtggacgtgagccacgaaga |
| | | ccctgaggtcaagttcaactggtacgtggacggcgtggaggtgcataatgccaa |
| | | gacaaagccgcgggaggagcagtacaacagcacgtaccgtgtggtcagcgtc |
| | | ctcaccgtcctgcaccaggactggctgaatggcaaggagtacaagtgcaaggt |
| | | ctccaacaaagccctcccaagcagcatcgagaaaaccatctccaaagccaaag |
| | | ggcagccccgagaaccacaggtgtacaccctgcccccatcccgggaggagat |
| | | gaccaagaaccaggtcagcctgacctgcctggtcaaaggcttctatcccagcga |
| | | catcgccgtggagtgggagagcaatgggcagccggagaacaactacaagacc |
| | | acgcctcccgtgctggactccgacggctccttcttcctctatagcaagctcaccgt |
| | | ggacaagagcaggtggcagcaggggaacgtcttctcatgctccgtgatgcatg |
| | | aggctctgcacaaccactacacgcagaagagcctctccctgtccccgggtaaa |
| 135 | CD73.4 VH (a.a.) | QVQLVESGGGVVQPGRSLRLSCAASGFTFSNYGM |
| | | HWVRQAPGKGLEWVAVILYDGSNKYYPDSVKGR |
| | | FTISRDNSKNTLYLQMNSLRAEDTAVYYCARGGSS |
| | | WYPDSFDIWGQGTMVTVSS |
| 136 | Wildtype IgG2 hinge | ERKCCVECPPCPAPPVAG |
| 137 | Wildtype IgG1 CH2 | PSVFLFPPKPKDTLMISRTPEVTCVVVDVSHEDPEV |
| | | KFNWYVDGVEVHNAKTKPREEQYNSTYRVVSVLT |
| | | VLHQDWLNGKEYKCKVSNKALPAPIEKTISKAK |
| 138 | Wildtype IgG1 CH3 | GQPREPQVYTLPPSREEMTKNQVSLTCLVKGFYPS |
| | | DIAVEWESNGQPENNYKTTPPVLDSDGSFFLYSKL |
| | | TVDKSRWQQGNVFSCSVMHEALHNHYTQKSLSLS |
| | | PGK |
| 139 | 11F11 VH- Nucleotide Sequence | CAGGTGCAGCTGGTGGAGTCTGGGGGAGGCGTG |
| | | GTCCAGCCTGGGAGGTCCCTGAGACTCTCCTGTG |
| | | CAACGTCTGGATTCACCTTCAGTAACTATGGCAT |
| | | GCACTGGGTCCGCCAGGCTCCAGGCAAGGGGCT |
| | | GGAGTGGGTGGCAGTTATATTGTATGATGGAAGT |
| | | AATAAATACTATCCAGACTCCGTGAAGGGCCGA |
| | | TTCACCATCTCCAGAGACAATTCCAAGAACACGC |
| | | TGTATCTGCAAATGAACAGCCTGAGAGCCGAGG |
| | | ACACGGCTGTGTATTACTGTGCGAGAGGGGGCA |
| | | GCAGCTGGTACCCTGATTCTTTTGATATCTGGGG |
| | | CCAAGGAACAATGGTCACCGTCTCTTCA |
| 140 | 11F11 VK1- Nucleotide Sequence | GAAATTGTGTTGACACAGTCTCCAGCCACCCTGT |
| | | CTTTGTCTCCAGGGGAAAGAGCCACCCTCTCCTG |
| | | CAGGGCCAGTCAGGGTGTTAGCAGCTACTTAGCC |
| | | TGGTACCAGCAGAAACCTGGCCAGGCTCCCAGG |
| | | CTCCTCATCTATGATGCATCCAACAGGGCCACTG |
| | | GCATCCCAGCCAGGTTCAGTGGCAGTGGGCCTG |
| | | GGACAGACTTCACTCTCACCATCAGCAGCCTAGA |
| | | GCCTGAAGATTTTGCAGTTTATTACTGTCAGCAG |
| | | CGTAGCAACTGGCATCTCACTTTCGGCGG |
| | | AGGGACCAAGGTGGAGATCAAA |
| 141 | 11F11 VK2- Nucleotide Sequence | GACATCCAGATGACCCAGTCTCCATCCTCACTGT |
| | | CTGCATCTGTAGGAGACAGAGTCACCATCACTTG |
| | | TCGGGCGAGTCAGGGTATTAGCAGCTGGTTAGCC |
| | | TGGTATCAGCAGAAACCAGAGAAAGCCCCTAAG |
| | | TCCCTGATCTATGCTGCATCCAGTTTGCAAAGTG |
| | | GGGTCCCATCAAGGTTCAGCGGCAGTGGATCTG |
| | | GGACAGATTTCACTCTCACCATCAGCAGCCTGCA |
| | | GCCTGAAGATTTTGCAACTTATTACTGCCAACAG |
| | | TATAATAGTTACCCTCTCACTTTCGGCGG |
| | | AGGGACCAAGGTGGAGATCAAA |
| 142 | 4C3 VH- Nucleotide Sequence | GAAGTGCAGCTGGTGGAGTCTGGGGGAGGCTTG |
| | | GTACAGCCTGGCAGGTCCCTGAGACTCTCCTGTG |
| | | CAGCCTCTGGATTCACCTTTGATGATTATGCCAT |
| | | GCACTGGGTCCGGCAAGCTCCAGGGAAGGGCCT |
| | | GGAGTGGGTCTCAGGTATTAGTTGGAAGAGTGG |
| | | TAGCATAGGCTATGCGGACTCTGTGAAGGGCCG |
| | | ATTCACCATCTCCAGAGACAACGCCAAGAACTCC |
| | | CTGTATCTGCAAATGAACAGTCTGAGAGCTGAG |
| | | GACACGGCCTTGTATTACTGTGTAAAAGGGTATT |
| | | ACGTTATTTTGACTGGCCTTGACTACTGGGGCCA |
| | | GGGAACCCTGGTCACCGTCTCCTCA |
| 143 | 4C3 VK1- Nucleotide Sequence | GAAATTGTGTTGACGCAGTCTCCAGGCACCCTGT |
| | | CTTTGTCTCCAGGGGAAAGAGCCACCCTCTCCTG |
| | | CAGGGCCAGTCAGAGTGTTAGCAGCTACTTAGCC |
| | | TGGTACCAGCAGAAACCTGGCCAGGCTCCCAGG |
| | | CTCCTCATCTATGGTGCATCCAGCAGGGCCACTG |
| | | GCATCCCAGACAGGTTCAGTGGCAGTGGGTCTG |
| | | GGACAGACTTCACTCTCACCATCAGCAGACTGGA |
| | | GCCTGAAGATTTTGCAGTGTATTACTGTCAGCAG |
| | | TATGGTAGCTCACCGCTCACTTTCGGCGGAGGGA |
| | | CCAAGGTGGAGATCAAA |
| 144 | 4C3 VK2- Nucleotide Sequence | GACATCCAGATGACCCAGTCTCCATCCTCACTGT |
| | | CTGCATCTGTAGGAGACAGAGTCACCTTCACTTG |
| | | TCGGGCGAGTCAGGGTATTAGCAGCTGGTTAGCC |
| | | TGGTATCAGCAGAAACCAGAGAAAGCCCCTAAG |
| | | TCCCTGATCTATGCTGCATCCAGTTTGCAAAGTG |
| | | GGGTCCCATCAAGGTTCAGCGGCAGTGGATCTG |
| | | GGACAGATTTCACTCTCACCATCAGCAGCCTGCA |
| | | GCCTGAAGATTTTGCAACTTATTACTGCCAACAG |
| | | TATAATAGTTACCCTCCAACGTTCGGCCA |
| | | GGGGACCAAGGTGGAAATCAAA |
| 145 | 4C3 VK3- Nucleotide Sequence | GACATCCAGATGACCCAGTCTCCATCCTCACTGT |
| | | CTGCATCTGTAGGAGACAGAGTCACCTTCACTTG |
| | | TCGGGCGAGTCAGGGTATTAGCAGCTGGTTAGCC |
| | | TGGTATCAGCAGAAACCAGAGAAAGCCCCTAAG |
| | | TCCCTGATCTATGCTGCATCCAGTTTGCAAAGTG |
| | | GGGTCCCATCAAGGTTCAGCGGCAGTGGATCTG |
| | | GGACAGATTTCACTCTCACCATCAGCAGCCTGCA |
| | | GCCTGAAGATTTTGCAACTTATTACTGCCAACAG |
| | | TATAATAGTTACCCTCCAACGTTCGGCCA |
| | | AGGGACCAAGGTGGAAATCAAA |
| 146 | 4D4 VH- Nucleotide Sequence | CAGGTGCAGCTGGTGGAGTCTGGGGGAGGCGTG |
| | | GTCCAGCCTGGGAGGTCCCTGAGACTCTCCTGTG |
| | | CAGCGTCTGGATTCACCTTCAGTAACTATGGCAT |
| | | GCACTGGGTCCGCCAGGCTCCAGGCAAGGGGCT |
| | | GGAGTGGGTGGCAGTTATATGGTATGATGAAAG |
| | | TAATAAATACTATGCAGACTCCGTGAAGGGCCG |
| | | ATTCACCATCTCCAGAGACAATTCCAAGAACACG |
| | | CTGTTTCTGCAAATGAACAGCCTGAGAGCCGAG |
| | | GACACGGCTGTGTATTATTGTGCGAGAGGGTATA |
| | | ACAGCAGGTGGTACCCTGATGCTTTTGATATCTG |
| | | GGGCCAAGGGACAATGGTCACCGTCTCTTCA |
| 147 | 4D4 VK1- Nucleotide Sequence | GACATCCAGATGACCCAGTCTCCATCCTCACTGT |
| | | CTGCATCTGTAGGAGACAGAGTCACCATCACTTG |
| | | TCGGGCGAGTCAGGGTATTAGCAGCTGGTTAGCC |
| | | TGGTATCAGCAGAAACCAGAGAAAGCCCCTAAG |
| | | TCCCTGATCTATGCTGCATCCAGTTTGCAAAGTG |
| | | GGGTCCCATCAAGGTTCAGCGGCAGTGGATCTG |
| | | GGACAGATTTCACTCTCACCATCAGCAGCCTGCA |
| | | GCCTGAAGATTTTGCAACTTATTACTGCCAACAG |
| | | TATAATAGTTACCCGCTCACTTTCGGCGGAGGGA |
| | | CCAAGGTGGAGATCAAA |
| 148 | 10D2 VH1- Nucleotide Sequence | CAGGTGCAGCTGGTGGAGTCTGGGGGAGGCGTG |
| | | GTCCAGCCTGGGAGGTCCCTGAGACTCTCCTGTG |
| | | CAGCGTCTGGATTCACCTTCAGTAACTATGGCCT |
| | | GCACTGGGTCCGCCAGGCTCCAGGCAAGGGGCT |
| | | GGAGTGGGTGGCAGTTATACGGTATGATGGAAG |
| | | TAATAAATACTATGCAGACTCCGTGAAGGGCCG |
| | | ATTCACCATCTCCAGAGACAATTCCAAGAACACG |
| | | CTGTATCTGCAAATGAGCAGCCTGAGAGCCGAG |
| | | GACACGGCTGTGTATTACTGTGCGAGGGGGGGC |
| | | AGCAGCTGGTACCCGGACGGTTTGGACGTCTGG |
| | | GGCCAAGGGACCACGGTCACCGTCTCCTCA |
| 149 | 10D2 VK1- Nucleotide Sequence | GCCATCCAGTTGACCCAGTCTCCATCCTCCCTGT |
| | | CTGCATCTGTAGGAGACAGAGTCACCATCACTTG |
| | | CCGGGCAAGTCAGGGCATTAGCAGTGCTTTAGCC |
| | | TGGTATCAGCAGAAACCAGGGAAAGCTCCTAAG |
| | | CTCCTGATCTATGATGCCTCCAGTTTGGAAAGTG |
| | | GGGTCCCATCAAGGTTCAGCGGCAGTGGATCTG |
| | | GGACAGATTTCACTCTCACCATCAGCAGCCTGCA |
| | | GCCTGAAGATTTTGCAACTTATTACTGTCAACAG |
| | | TTTAATAGTTACCCCACTTTCGGCGGAGGGACCA |
| | | AGGTGGAGATCAAA |
| 150 | 10D2 VK2- Nucleotide Sequence | GACATCCAGATGACCCAGTCTCCATCCTCACTGT |
| | | CTGCATCTGTAGGAGACAGAGTCACCATCACTTG |
| | | TCGGGCGAGTCAGGGTATTAGCAGCTGGTTAGCC |
| | | TGGTATCAGCAGAAACCAGAGAAAGCCCCTAAG |
| | | TCCCTGATCTATGCTGCATCCAGTTTGCAAAGTG |
| | | GGGTCCCATCAAGGTTCAGCGGCAGTGGATCTG |
| | | GGACAGATTTCACTCTCACCATCAGCAGCCTGCA |
| | | GCCTGAAGATTTTGCAACTTATTACTGCCAACAG |
| | | TATAATAGTTACCCGCTCACTTTCGGCGGAGGGA |
| | | CCAAGGTGGAGATCAAA |
| 151 | 11A6 VH- Nucleotide Sequence | GAAGTGCAGCTGGTGGAATCTGGGGGAAACTTG |
| | | GTACAGCCTGGCAGGTCCCTGAGACTCTCCTGTG |
| | | CAGCCTCTGGATTCACCTTTGATGATTATGCCAT |
| | | GCACTGGGTCCGGCAAGCTCCAGGGAAGGGCCT |
| | | GGAGTGGGTCTCAGGTATTAGTTGGAATAATAAT |
| | | GACATAGGCTATGCGGACTCTGTGAAGGGCCGA |
| | | TTCATCATCTCCAGAGACAACGCCAAGAACTCCC |
| | | TGTATCTGCAAATGAACAGTCTGAGACCTGAGG |
| | | ACACGGCCTTGTATTATTGTGTAAAAGGTTATTA |
| | | CGTTATTTTGACTGGTCTTGACTACTGGGGCCAG |
| | | GGAACCCCGGTCACCGTCTCCTCA |
| 152 | 11A6 VK1- Nucleotide Sequence | GACATCCAGATGACCCAGTCTCCATCCTCACTGT |
| | | CTGCATCTGTAGGAGACAGAGTCACCATCACTTG |
| | | TCGGGCGAGTCAGGGTATTAGCAGCTGGTTAGCC |
| | | TGGTATCAGCAGAAACCAGAGAAAGCCCCTAAG |
| | | TCCCTGATCTATGCTGCATCCAGTTTGCAAAGTG |
| | | GGGTCCCATCAAGGTTCAGCGGCAGTGGATCTG |
| | | GGACAGATTTCACTCTCACCATCAGCAGCCTGCA |
| | | GCCTGAAGATTTTGCAACTTATTACTGCCAACAG |
| | | TATAATAGTTACCCGCTCACTTTCGGCGGAGGGA |
| | | CCAAGGTGGAGATCAAA |
| 153 | 24H2 VH- Nucleotide Sequence | CAGGTGCAACTGGTGGAGTCTGGGGGAGGCGTG |
| | | GTCCAGCCTGGGAGGTCCCTGAGACTCTCCTGTG |
| | | CAGCGTCTGGATTCACCTTCAGTAACTATGGCAT |
| | | GCACTGGGTCCGCCAGGCTCCAGGCAAGGGGCT |
| | | GGAGTGGGTGGCAGTTATATGGTATGATGGAGG |
| | | TAATAAATACTATGCAGACTCCGTGAAGGGCCG |
| | | ATTCACCATCTCCAGAGACAATTCCAAGAACACG |
| | | CTGTTTCTGCAAATGAACAGCCTGAGAGCCGAA |
| | | GACACGGCTGTGTATTACTGTGCGAGAGGGGGC |
| | | AGCAGCTGGTACCCTGATGCTTTTGATATCTGGG |
| | | GCCAAGGGACAATGGTCACCGTCTCTTCA |
| 154 | 24H2 VK1- Nucleotide Sequence | GACATCCAGATGACCCAGTCTCCATCCTCACTGT |
| | | CTGCATCTGTAGGAGACAGAGTCACCATCACTTG |
| | | TCGGGCGAGTCAGGGTATTAGCAGCTGGTTAGCC |
| | | TGGTATCAGCAGAAACCAGAGAAAGCCCCTAAG |
| | | TCCCTGATCTATGCTGCATCCAGTTTGCAAAGTG |
| | | GGGTCCCATCAAGGTTCAGCGGCAGTGGATCTG |
| | | GGACAGATTTCACTCTCACCATCAGCAGCCTGCA |
| | | GCCTGAAGATTTTGCAACTTATTACTGCCAACAG |
| | | TATAATAGTTACCCTCTCACTTTCGGCGGAGGGA |
| | | CCAAGGTGGAGATCAAA |
| 155 | 5F8 VH- Nucleotide Sequence | GAGGTGCAGCTGGTGGAGTCCGGGGGAGGCTTA |
| | | GTTCAGCCTGGGGGGTCCCTGAGACTCTCCTGTG |
| | | CAGCCTCTGGATTCACCTTCAGTAGCTACTGGAT |
| | | GCACTGGGTCCGCCAAGCTCCAGGGAAGGGGCT |
| | | GGTGTGGGTCTCACGTATTATTAGTGATGGGAGT |
| | | AGCACAGGTTACGCGGATTCCGTGAAGGGCCGA |
| | | TTCACCATCTCCAGAGACAACGCCAAGAACACG |
| | | CTGTATCTGCAAATGAACAGTCTGAGAGCCGAG |
| | | GACACGGCTGTGTATTACTGTGCAAGAGAGTTTA |
| | | GCAGTGGCTGGTACTTTGACTACTGGGGCCAGGG |
| | | AACCCTGGTCACCGTCTCCTCA |
| 156 | 5F8 VK1- Nucleotide Sequence | GCCATCCAGTTGACCCAGTCTCCATCCTCCCTGT |
| | | CTGCATCTGTAGGAGACAGAGTCACCATCACTTG |
| | | CCGGGCAAGTCAGGGCATTAGCAGTGCTTTAGCC |
| | | TGGTATCAGCAGAAACCAGGGAAAGCTCCTAAG |
| | | CTCCTGATCTATGATGCCTCCAGTTTGGAAAGTG |
| | | GGGTCCCATCAAGGTTCAGCGGCAGTGGATCTG |
| | | GGACAGATTTCACTCTCACCATCAGCAGCCTGCA |
| | | GCCTGAAGATTTTGCAACTTATTACTGTCAACAG |
| | | TTTAGTAGTTACCCTCGGACGTTCGGCCAAGGGA |
| | | CCAAGGTGGAAATCAAA |
| 157 | 5F8 VK2- Nucleotide Sequence | GACATCCAGATGACCCAGTCTCCATCCTCACTGT |
| | | CTGCATCTGTAGGAGACAGAGTCACCATCACTTG |
| | | TCGGGCGAGTCAGGGTATTAGCAGCTGGTTAGCC |
| | | TGGTATCAGCAGAAACCAGAGAAAGCCCCTAAG |
| | | TCCCTGATCTATGCTGCATCCAGTTTGCAAAGTG |
| | | GGGTCCCATCAAGGTTCAGCGGCAGTGGATCTG |
| | | GGACAGGTTTCACTCTCACCATCAGCAGCCTGCA |
| | | GCCTGAAGATTTTGCAACTTATTACTGCCAACAG |
| | | TATAATAGTTACCCTCGGACGTTCGGCCAAGGGA |
| | | CCAAGGTGGAAATCAAA |
| 158 | 6E11 VH- Nucleotide Sequence | GAAGTGCAGCTGGTGGAGTCTGGGGGAGCCTTG |
| | | GTACAGCCTGGCAGGTCCCTGAGACTCTCCTGTG |
| | | CAGCCTCTGGATTCACCTTTGATGATTATGCCAT |
| | | GCACTGGGTCCGGCAAGCTCCAGGGAAGGGCCT |
| | | GGAGTGGGTCTCAGGTATTACTTGGAATAGTGGT |
| | | GGCATAGGCTACGCGGACTCTGTGAAGGGCCGA |
| | | TTCACCATCTCCAGAGACAACGCCAAGAACTCCC |
| | | TGTATCTGCAAATGAACAGTCTGAGAGCTGAGG |
| | | ACACGGCCTTGTATTACTGTGCAAAAGATAGGTA |
| | | TTACAGCAGTTGGCTCCTCTTTGACAACTGGGGC |
| | | CAGGGAATTCTGGTCACCGTCTCCTCA |
| 159 | 6E11 VK1- Nucleotide Sequence | GAAATTGTGTTGACGCAGTCTCCAGGCACCCTGT |
| | | CTTTGTCTCCAGGGGAAAGAGCCACCCTCTCCTG |
| | | CAGGGCCAGTCAGAGTGTTAGCAGCAGCTACTT |
| | | AGCCTGGTACCAGCAGAAACCTGGCCAGGCTCC |
| | | CAGGCTCCTCATCTATGGTGCATCCAGCAGGGCC |
| | | ACTGGCATCCCAGACAGGTTCAGTGGCAGTGGG |
| | | TCTGGGACAGACTTCACTCTCACCATCAGCAGAC |
| | | TGGAGCCTGAAGATTTTGCAGTGTATTACTGTCA |
| | | GCATTATGGTAGCTCATTCACTTTCGGCCCTGGG |
| | | ACCAAAGTGGATATCAAA |
| 160 | 7A11 VH- Nucleotide Sequence | GAAGTGCAGCTGGTGGAGTCTGGGGGAGGCTTG |
| | | GTACAGACTGGCAGGTCCCTGAGACTCTCCTGTG |
| | | CAGCCTCTGGATTCACCTTTGATGATTATGCCAT |
| | | GCACTGGGTCCGGCAAGCTCCAGGGAAGGGCCT |
| | | GGAGTGGGTCTCAGATATTAGTTGGAATAGTGAT |
| | | ATTATAGGCTATGCGGACTCTGTGAAGGGCCGAT |
| | | TCACCATCTCTAGAGACAACGCCAAGAACTCCCT |
| | | GTATCTGCAAATGAACAGTCTGAGAGCTGAGGA |
| | | CACGGCCTTGTATTACTGTGCAAAAGATATTTAT |
| | | GGTTCGGGGAGTTCTTTTTTTGACTACTGGGGCC |
| | | AGGGAATCCTGGTCACCGTCTCCTCA |
| 161 | 7A11 VK1- Nucleotide Sequence | GACATCCAGATGACCCAGTCTCCATCCTCACTGT |
| | | CTGCATCTGTAGGAGACAGAGTCACCATCACTTG |
| | | TCGGGCGAGTCAGTATATTAGCAGCTGGTTAGCC |
| | | TGGTATCAGCAGAAACCAGAGAAAGCCCCTAAG |
| | | TCCCTGATCTATGCTGCATCCAGTTTGCAAAGTG |
| | | GGGTCCCATCAAGGTTCAGCGGCAGTGGATCTG |
| | | GGACAGATTTCACTCTCACCATCAGCAGCCTGCA |
| | | GCCTGAAGATTTTGCAACTTATTACTGCCAACAG |
| | | TATCATAGTTACCCTCCCACCTTCGGCCA |
| | | AGGGACACGACTGGAGATTAAA |
| 162 | IgG1-IgG2-IgG1f2 (MHCCR) | ASTKGPSVFPLAPSSKSTSGGTAALGCLVKDYFPEP |
| | | VTVSWNSGALTSGVHTFPAVLQSSGLYSLSSVVTV |
| | | PSSSLGTQTYICNVNHKPSNTKVDKKVERKCCVEC |
| | | PPCPAPPVAGPSVFLFPPKPKDTLMISRTPEVTCVV |
| | | VDVSHEDPEVKFNWYVDGVEVHNAKTKPREEQY |
| | | NSTYRVVSVLTVLHQDWLNGKEYKCKVSNKALPA |
| | | PIEKTISKAKGQPREPQVYTLPPSREEMTKNQVSLT |
| | | CLVKGFYPSDIAVEWESNGQPENNYKTTPPVLDSD |
| | | GSFFLYSKLTVDKSRWQQGNVFSCSVMHEALHNH |
| | | YTQKSLSLSPGK |
| 163 | IgG1-IgG2CS-IgG1f2 (MHCCR) | ASTKGPSVFPLAPSSKSTSGGTAALGCLVKDYFPEP |
| | | VTVSWNSGALTSGVHTFPAVLQSSGLYSLSSVVTV |
| | | PSSSLGTQTYICNVNHKPSNTKVDKKVERKSCVEC |
| | | PPCPAPPVAGPSVFLFPPKPKDTLMISRTPEVTCVV |
| | | VDVSHEDPEVKFNWYVDGVEVHNAKTKPREEQY |
| | | NSTYRVVSVLTVLHQDWLNGKEYKCKVSNKALPA |
| | | PIEKTISKAKGQPREPQVYTLPPSREEMTKNQVSLT |
| | | CLVKGFYPSDIAVEWESNGQPENNYKTTPPVLDSD |
| | | GSFFLYSKLTVDKSRWQQGNVFSCSVMHEALHNH |
| | | YTQKSLSLSPGK |
| 164 | IgG2-IgG1f2 (MHCCR) | ASTKGPSVFPLAPCSRSTSESTAALGCLVKDYFPEP |
| | | VTVSWNSGALTSGVHTFPAVLQSSGLYSLSSVVTV |
| | | PSSNFGTQTYTCNVDHKPSNTKVDKTVERKCCVEC |
| | | PPCPAPPVAGPSVFLFPPKPKDTLMISRTPEVTCVV |
| | | VDVSHEDPEVKFNWYVDGVEVHNAKTKPREEQY |
| | | NSTYRVVSVLTVLHQDWLNGKEYKCKVSNKALPA |
| | | PIEKTISKAKGQPREPQVYTLPPSREEMTKNQVSLT |
| | | CLVKGFYPSDIAVEWESNGQPENNYKTTPPVLDSD |
| | | GSFFLYSKLTVDKSRWQQGNVFSCSVMHEALHNH |
| | | YTQKSLSLSPGK |
| 165 | IgG2CS-IgG1f2 (MHCCR) | ASTKGPSVFPLAPCSRSTSESTAALGCLVKDYFPEP |
| | | VTVSWNSGALTSGVHTFPAVLQSSGLYSLSSVVTV |
| | | PSSNFGTQTYTCNVDHKPSNTKVDKTVERKSCVEC |
| | | PPCPAPPVAGPSVFLFPPKPKDTLMISRTPEVTCVV |
| | | VDVSHEDPEVKFNWYVDGVEVHNAKTKPREEQY |
| | | NSTYRVVSVLTVLHQDWLNGKEYKCKVSNKALPA |
| | | PIEKTISKAKGQPREPQVYTLPPSREEMTKNQVSLT |
| | | CLVKGFYPSDIAVEWESNGQPENNYKTTPPVLDSD |
| | | GSFFLYSKLTVDKSRWQQGNVFSCSVMHEALHNH |
| | | YTQKSLSLSPGK |
| 166 | IgG1-IgG2-IgG1.1f (MHCCR) | ASTKGPSVFPLAPSSKSTSGGTAALGCLVKDYFPEP |
| | | VTVSWNSGALTSGVHTFPAVLQSSGLYSLSSVVTV |
| | | PSSSLGTQTYICNVNHKPSNTKVDKKVERKCCVEC |
| | | PPCPAPPVAGPSVFLFPPKPKDTLMISRTPEVTCVV |
| | | VDVSHEDPEVKFNWYVDGVEVHNAKTKPREEQY |
| | | NSTYRVVSVLTVLHQDWLNGKEYKCKVSNKALPS |
| | | SIEKTISKAKGQPREPQVYTLPPSREEMTKNQVSLT |
| | | CLVKGFYPSDIAVEWESNGQPENNYKTTPPVLDSD |
| | | GSFFLYSKLTVDKSRWQQGNVFSCSVMHEALHNH |
| | | YTQKSLSLSPGK |
| 167 | IgG1-IgG2CS-IgG1.1f (MHCCR) | ASTKGPSVFPLAPSSKSTSGGTAALGCLVKDYFPEP |
| | | VTVSWNSGALTSGVHTFPAVLQSSGLYSLSSVVTV |
| | | PSSSLGTQTYICNVNHKPSNTKVDKKVERKSCVEC |
| | | PPCPAPPVAGPSVFLFPPKPKDTLMISRTPEVTCVV |
| | | VDVSHEDPEVKFNWYVDGVEVHNAKTKPREEQY |
| | | NSTYRVVSVLTVLHQDWLNGKEYKCKVSNKALPS |
| | | SIEKTISKAKGQPREPQVYTLPPSREEMTKNQVSLT |
| | | CLVKGFYPSDIAVEWESNGQPENNYKTTPPVLDSD |
| | | GSFFLYSKLTVDKSRWQQGNVFSCSVMHEALHNH |
| | | YTQKSLSLSPGK |
| 168 | IgG2-IgG1.1f (MHCCR) | ASTKGPSVFPLAPCSRSTSESTAALGCLVKDYFPEP |
| | | VTVSWNSGALTSGVHTFPAVLQSSGLYSLSSVVTV |
| | | PSSNFGTQTYTCNVDHKPSNTKVDKTVERKCCVEC |
| | | PPCPAPPVAGPSVFLFPPKPKDTLMISRTPEVTCVV |
| | | VDVSHEDPEVKFNWYVDGVEVHNAKTKPREEQY |
| | | NSTYRVVSVLTVLHQDWLNGKEYKCKVSNKALPS |
| | | SIEKTISKAKGQPREPQVYTLPPSREEMTKNQVSLT |
| | | CLVKGFYPSDIAVEWESNGQPENNYKTTPPVLDSD |
| | | GSFFLYSKLTVDKSRWQQGNVFSCSVMHEALHNH |
| | | YTQKSLSLSPGK |
| 169 | IgG2CS-IgG1.1f (MHCCR) | ASTKGPSVFPLAPCSRSTSESTAALGCLVKDYFPEP |
| | | VTVSWNSGALTSGVHTFPAVLQSSGLYSLSSVVTV |
| | | PSSNFGTQTYTCNVDHKPSNTKVDKTVERKSCVEC |
| | | PPCPAPPVAGPSVFLFPPKPKDTLMISRTPEVTCVV |
| | | VDVSHEDPEVKFNWYVDGVEVHNAKTKPREEQY |
| | | NSTYRVVSVLTVLHQDWLNGKEYKCKVSNKALPS |
| | | SIEKTISKAKGQPREPQVYTLPPSREEMTKNQVSLT |
| | | CLVKGFYPSDIAVEWESNGQPENNYKTTPPVLDSD |
| | | GSFFLYSKLTVDKSRWQQGNVFSCSVMHEALHNH |
| | | YTQKSLSLSPGK |
| 170 | CD73.3 VH (a.a) | EVQLVESGGGLVQPGRSLRLSCAASGFTFDDYAM |
| | | HWVRQAPGKGLEWVSGISWKSGSIGYADSVKGRF |
| | | TISRDNAKNSLYLQMNSLRAEDTVLYYCVKGYYVI |
| | | LTGLDYWGQGTLVTVSS |
| 171 | CD73.5 VH (a.a) | QVQLVESGGGVVQPGRSLRLSCASSGFTFSNYGMH |
| | | WVRQAPGKGLEWVAVILYDGSNKYYPDSVKGRFT |
| | | ISRDNSKNTLYLQMNSLRAEDTAVYYCARGGSSW |
| | | YPDSFDIWGQGTMVTVSS |
| 172 | CD73.6 VH (a.a) | QVQLVESGGGVVQPGRSLRLSCAASGFTFSNYGM |
| | | HWVRQAPGKGLEWVAVILYDSSNKYYPDSVKGRF |
| | | TISRDNSKNTLYLQMNSLRAEDTAVYYCARGGSS |
| | | WYPDSFDIWGQGTMVTVSS |
| 173 | CD73.7 VH (a.a) | QVQLVESGGGVVQPGRSLRLSCASSGFTFSNYGMH |
| | | WVRQAPGKGLEWVAVILYDSSNKYYPDSVKGRFT |
| | | ISRDNSKNTLYLQMNSLRAEDTAVYYCARGGSSW |
| | | YPDSFDIWGQGTMVTVSS |
| 174 | CD73.8 VH (a.a) | QVQLVESGGGVVQPGRSLRLSCAASGFTFSNYGM |
| | | HWVRQAPGKGLEWVAVIWYDSSNKYYPDSVKGR |
| | | FTISRDNSKNTLYLQMNSLRAEDTAVYYCARGGSS |
| | | WYPDSFDIWGQGTMVTVSS |
| 175 | CD73.9 VH (a.a) | QVQLVESGGGVVQPGRSLRLSCASSGFTFSNYGMH |
| | | WVRQAPGKGLEWVAVIWYDSSNKYYPDSVKGRF |
| | | TISRDNSKNTLYLQMNSLRAEDTAVYYCARGGSS |
| | | WYPDSFDIWGQGTMVTVSS |
| 176 | CD73.10 VH (a.a) | QVQLVESGGGVVQPGRSLRLSCAASGFTFSNYGM |
| | | HWVRQAPGKGLEWVAVIWYDESNKYYPDSVKGR |
| | | FTISRDNSKNTLYLQMNSLRAEDTAVYYCARGGSS |
| | | WYPDSFDIWGQGTMVTVSS |
| 177 | CD73.11 VH (a.a) | QVQLVESGGGVVQPGRSLRLSCAASGFTFSNYGM |
| | | HWVRQAPGKGLEWVAVIWYDESNKYYADSVKGR |
| | | FTISRDNSKNTLFLQMNSLRAEDTAVYYCARGYNS |
| | | RWYPDAFDIWGQGTMVTVSS |
| 178 | IgG2/IgG1 hybrid hinge | ERKCCVECPPCPAPELLGG |
| 179 | IgG2 C219S/IgG1 hybrid hinge | ERKSCVECPPCPAPELLGG |
| 180 | IgG1-IgG2-IgG1f | ASTKGPSVFPLAPSSKSTSGGTAALGCLVKDYFPEP |
| | | VTVSWNSGALTSGVHTFPAVLQSSGLYSLSSVVTV |
| | | PSSSLGTQTYICNVNHKPSNTKVDKKVERKCCVEC |
| | | PPCPAPELLGGPSVFLFPPKPKDTLMISRTPEVTCVV |
| | | VDVSHEDPEVKFNWYVDGVEVHNAKTKPREEQY |
| | | NSTYRVVSVLTVLHQDWLNGKEYKCKVSNKALPA |
| | | PIEKTISKAKGQPREPQVYTLPPSREEMTKNQVSLT |
| | | CLVKGFYPSDIAVEWESNGQPENNYKTTPPVLDSD |
| | | GSFFLYSKLTVDKSRWQQGNVFSCSVMHEALHNH |
| | | YTQKSLSLSPGK |
| 181 | IgG1-IgG2CS-IgG1f | ASTKGPSVFPLAPSSKSTSGGTAALGCLVKDYFPEP |
| | | VTVSWNSGALTSGVHTFPAVLQSSGLYSLSSVVTV |
| | | PSSSLGTQTYICNVNHKPSNTKVDKKVERKSCVEC |
| | | PPCPAPELLGGPSVFLFPPKPKDTLMISRTPEVTCVV |
| | | VDVSHEDPEVKFNWYVDGVEVHNAKTKPREEQY |
| | | NSTYRVVSVLTVLHQDWLNGKEYKCKVSNKALPA |
| | | PIEKTISKAKGQPREPQVYTLPPSREEMTKNQVSLT |
| | | CLVKGFYPSDIAVEWESNGQPENNYKTTPPVLDSD |
| | | GSFFLYSKLTVDKSRWQQGNVFSCSVMHEALHNH |
| | | YTQKSLSLSPGK |
| 182 | IgG2-IgG1f | ASTKGPSVFPLAPCSRSTSESTAALGCLVKDYFPEP |
| | | VTVSWNSGALTSGVHTFPAVLQSSGLYSLSSVVTV |
| | | PSSNFGTQTYTCNVDHKPSNTKVDKTVERKCCVEC |
| | | PPCPAPELLGGPSVFLFPPKPKDTLMISRTPEVTCVV |
| | | VDVSHEDPEVKFNWYVDGVEVHNAKTKPREEQY |
| | | NSTYRVVSVLTVLHQDWLNGKEYKCKVSNKALPA |
| | | PIEKTISKAKGQPREPQVYTLPPSREEMTKNQVSLT |
| | | CLVKGFYPSDIAVEWESNGQPENNYKTTPPVLDSD |
| | | GSFFLYSKLTVDKSRWQQGNVFSCSVMHEALHNH |
| | | YTQKSLSLSPGK |
| 183 | IgG2CS-IgG1f | ASTKGPSVFPLAPCSRSTSESTAALGCLVKDYFPEP |
| | | VTVSWNSGALTSGVHTFPAVLQSSGLYSLSSVVTV |
| | | PSSNFGTQTYTCNVDHKPSNTKVDKTVERKSCVEC |
| | | PPCPAPELLGGPSVFLFPPKPKDTLMISRTPEVTCVV |
| | | VDVSHEDPEVKFNWYVDGVEVHNAKTKPREEQY |
| | | NSTYRVVSVLTVLHQDWLNGKEYKCKVSNKALPA |
| | | PIEKTISKAKGQPREPQVYTLPPSREEMTKNQVSLT |
| | | CLVKGFYPSDIAVEWESNGQPENNYKTTPPVLDSD |
| | | GSFFLYSKLTVDKSRWQQGNVFSCSVMHEALHNH |
| | | YTQKSLSLSPGK |
| 184 | mAb-CD73.3-Vh-hHC-IgG1.1f | EVQLVESGGG LVQPGRSLRL SCAASGFTFD |
| | | DYAMHWVRQA PGKGLEWVSG ISWKSGSIGY |
| | | ADSVKGRFTI SRDNAKNSLY LQMNSLRAED |
| | | TALYYCAKGY YVILTGLDYW GQGTLVTVSS |
| | | ASTKGPSVFP LAPSSKSTSG GTAALGCLVK |
| | | DYFPEPVTVS WNSGALTSGV HTFPAVLQSS |
| | | GLYSLSSVVT VPSSSLGTQT YICNVNHKPS |
| | | NTKVDKRVEP KSCDKTHTCP PCPAPEAEGA |
| | | PSVFLFPPKP KDTLMISRTP EVTCVVVDVS |
| | | HEDPEVKFNW YVDGVEVHNA KTKPREEQYN |
| | | STYRVVSVLT VLHQDWLNGK EYKCKVSNKA |
| | | LPSSIEKTIS KAKGQPREPQ VYTLPPSREE |
| | | MTKNQVSLTC LVKGFYPSDI AVEWESNGQP |
| | | ENNYKTTPPV LDSDGSFFLY SKLTVDKSRW |
| | | QQGNVFSCSV MHEALHNHYT QKSLSLSPG |
| 185 | mAb-CD73.3-Vh-hHC-IgG2-C219S | EVQLVESGGG LVQPGRSLRL SCAASGFTFD |
| | | DYAMHWVRQA PGKGLEWVSG ISWKSGSIGY |
| | | ADSVKGRFTI SRDNAKNSLY LQMNSLRAED |
| | | TALYYCAKGY YVILTGLDYW GQGTLVTVSS |
| | | ASTKGPSVFP LAPCSRSTSE STAALGCLVK |
| | | DYFPEPVTVS WNSGALTSGV HTFPAVLQSS |
| | | GLYSLSSVVT VPSSNFGTQT YTCNVDHKPS |
| | | NTKVDKTVER KSCVECPPCP APPVAGPSVF |
| | | LFPPKPKDTL MISRTPEVTC VVVDVSHEDP |
| | | EVQFNWYVDG VEVHNAKTKP REEQFNSTFR |
| | | VVSVLTVVHQ DWLNGKEYKC KVSNKGLPAP |
| | | IEKTISKTKG QPREPQVYTL PPSREEMTKN |
| | | QVSLTCLVKG FYPSDIAVEW ESNGQPENNY |
| | | KTTPPMLDSD GSFFLYSKLT VDKSRWQQGN |
| | | VFSCSVMHEA LHNHYTQKSL SLSPG |
| 186 | mAb-CD73.3-Vh-hHC-IgG2-C219S- | EVQLVESGGG LVQPGRSLRL SCAASGFTFD |
| | IgG1.1f | DYAMHWVRQA PGKGLEWVSG ISWKSGSIGY |
| | | ADSVKGRFTI SRDNAKNSLY LQMNSLRAED |
| | | TALYYCAKGY YVILTGLDYW GQGTLVTVSS |
| | | ASTKGPSVFP LAPCSRSTSE STAALGCLVK |
| | | DYFPEPVTVS WNSGALTSGV HTFPAVLQSS |
| | | GLYSLSSVVT VPSSNFGTQT YTCNVDHKPS |
| | | NTKVDKTVER KSCVECPPCP APPVAGPSVF |
| | | LFPPKPKDTL MISRTPEVTC VVVDVSHEDP |
| | | EVKFNWYVDG VEVHNAKTKP REEQYNSTYR |
| | | VVSVLTVLHQ DWLNGKEYKC KVSNKALPSS |
| | | IEKTISKAKG QPREPQVYTL PPSREEMTKN |
| | | QVSLTCLVKG FYPSDIAVEW ESNGQPENNY |
| | | KTTPPVLDSD GSFFLYSKLT VDKSRWQQGN |
| | | VFSCSVMHEA LHNHYTQKSL SLSPG |
| 187 | mAb-CD73.4-Vh-hHC-IgG1.1f | QVQLVESGGG VVQPGRSLRL SCAASGFTFS |
| | | NYGMHWVRQA PGKGLEWVAV ILYDGSNKYY |
| | | PDSVKGRFTI SRDNSKNTLY LQMNSLRAED |
| | | TAVYYCARGG SSWYPDSFDI WGQGTMVTVS |
| | | SASTKGPSVF PLAPSSKSTS GGTAALGCLV |
| | | KDYFPEPVTV SWNSGALTSG VHTFPAVLQS |
| | | SGLYSLSSVV TVPSSSLGTQ TYICNVNHKP |
| | | SNTKVDKRVE PKSCDKTHTC PPCPAPEAEG |
| | | APSVFLFPPK PKDTLMISRT PEVTCVVVDV |
| | | SHEDPEVKFN WYVDGVEVHN AKTKPREEQY |
| | | NSTYRVVSVL TVLHQDWLNG KEYKCKVSNK |
| | | ALPSSIEKTI SKAKGQPREP QVYTLPPSRE |
| | | EMTKNQVSLT CLVKGFYPSD IAVEWESNGQ |
| | | PENNYKTTPP VLDSDGSFFL YSKLTVDKSR |
| | | WQQGNVFSCS VMHEALHNHY TQKSLSLSPG |
| 188 | mAb-CD73.4-Vh-hHC-IgG2-C219S | QVQLVESGGG VVQPGRSLRL SCAASGFTFS |
| | | NYGMHWVRQA PGKGLEWVAVILYDGSNKYY |
| | | PDSVKGRFTI SRDNSKNTLYLQMNSLRAED |
| | | TAVYYCARGG SSWYPDSFDIWGQGTMVTVS |
| | | SASTKGPSVF PLAPCSRSTSESTAALGCLV |
| | | KDYFPEPVTV SWNSGALTSGVHTFPAVLQS |
| | | SGLYSLSSVV TVPSSNFGTQTYTCNVDHKP |
| | | SNTKVDKTVE RKSCVECPPCPAPPVAGPSV |
| | | FLFPPKPKDT LMISRTPEVTCVVVDVSHED |
| | | PEVQFNWYVD GVEVHNAKTKPREEQFNSTF |
| | | RVVSVLTVVH QDWLNGKEYKCKVSNKGLPA |
| | | PIEKTISKTK GQPREPQVYTLPPSREEMTK |
| | | NQVSLTCLVK GFYPSDIAVEWESNGQPENN |
| | | YKTTPPMLDS DGSFFLYSKLTVDKSRWQQG |
| | | NVFSCSVMHE ALHNHYTQKSLSLSPG |
| 189 | mAb-CD73.4-Vh-hHC-IgG2-C219S- | QVQLVESGGG VVQPGRSLRL SCAASGFTFS |
| | IgG1.1f | NYGMHWVRQA PGKGLEWVAV ILYDGSNKYY |
| | (identical to SEQ ID NO: 133, | PDSVKGRFTI SRDNSKNTLY LQMNSLRAED |
| | except lacks | TAVYYCARGG SSWYPDSFDI WGQGTMVTVS |
| | C-terminal lysine) | SASTKGPSVF PLAPCSRSTS ESTAALGCLV |
| | | KDYFPEPVTV SWNSGALTSG VHTFPAVLQS |
| | | SGLYSLSSVV TVPSSNFGTQ TYTCNVDHKP |
| | | SNTKVDKTVE RKSCVECPPC PAPPVAGPSV |
| | | FLFPPKPKDT LMISRTPEVT CVVVDVSHED |
| | | PEVKFNWYVD GVEVHNAKTK PREEQYNSTY |
| | | RVVSVLTVLH QDWLNGKEYK CKVSNKALPS |
| | | SIEKTISKAK GQPREPQVYT LPPSREEMTK |
| | | NQVSLTCLVK GFYPSDIAVE WESNGQPENN |
| | | YKTTPPVLDS DGSFFLYSKL TVDKSRWQQG |
| | | NVFSCSVMHE ALHNHYTQKS LSLSPG |
| 190 | mAb-CD73.5-Vh-hHC-IgG1.1f | QVQLVESGGG VVQPGRSLRL SCASSGFTFS |
| | | NYGMHWVRQA PGKGLEWVAV ILYDGSNKYY |
| | | PDSVKGRFTI SRDNSKNTLY LQMNSLRAED |
| | | TAVYYCARGG SSWYPDSFDI WGQGTMVTVS |
| | | SASTKGPSVF PLAPSSKSTS GGTAALGCLV |
| | | KDYFPEPVTV SWNSGALTSG VHTFPAVLQS |
| | | SGLYSLSSVV TVPSSSLGTQ TYICNVNHKP |
| | | SNTKVDKRVE PKSCDKTHTC PPCPAPEAEG |
| | | APSVFLFPPK PKDTLMISRT PEVTCVVVDV |
| | | SHEDPEVKFN WYVDGVEVHN AKTKPREEQY |
| | | NSTYRVVSVL TVLHQDWLNG KEYKCKVSNK |
| | | ALPSSIEKTI SKAKGQPREP QVYTLPPSRE |
| | | EMTKNQVSLT CLVKGFYPSD IAVEWESNGQ |
| | | PENNYKTTPP VLDSDGSFFL YSKLTVDKSR |
| | | WQQGNVFSCS VMHEALHNHY TQKSLSLSPG |
| 191 | mAb-CD73.5-Vh-hHC-IgG2-C219S | QVQLVESGGG VVQPGRSLRL SCASSGFTFS |
| | | NYGMHWVRQA PGKGLEWVAV ILYDGSNKYY |
| | | PDSVKGRFTI SRDNSKNTLY LQMNSLRAED |
| | | TAVYYCARGG SSWYPDSFDI WGQGTMVTVS |
| | | SASTKGPSVF PLAPCSRSTS ESTAALGCLV |
| | | KDYFPEPVTV SWNSGALTSG VHTFPAVLQS |
| | | SGLYSLSSVV TVPSSNFGTQ TYTCNVDHKP |
| | | SNTKVDKTVE RKSCVECPPC PAPPVAGPSV |
| | | FLFPPKPKDT LMISRTPEVT CVVVDVSHED |
| | | PEVQFNWYVD GVEVHNAKTK PREEQFNSTF |
| | | RVVSVLTVVH QDWLNGKEYK CKVSNKGLPA |
| | | PIEKTISKTK GQPREPQVYT LPPSREEMTK |
| | | NQVSLTCLVK GFYPSDIAVE WESNGQPENN |
| | | YKTTPPMLDS DGSFFLYSKL TVDKSRWQQG |
| | | NVFSCSVMHE ALHNHYTQKS LSLSPG |
| 192 | mAb-CD73.5-Vh-hHC-IgG2-C219S- | QVQLVESGGG VVQPGRSLRL SCASSGFTFS |
| | IgG1.1f | NYGMHWVRQA PGKGLEWVAV ILYDGSNKYY |
| | | PDSVKGRFTI SRDNSKNTLY LQMNSLRAED |
| | | TAVYYCARGG SSWYPDSFDI WGQGTMVTVS |
| | | SASTKGPSVF PLAPCSRSTS ESTAALGCLV |
| | | KDYFPEPVTV SWNSGALTSG VHTFPAVLQS |
| | | SGLYSLSSVV TVPSSNFGTQ TYTCNVDHKP |
| | | SNTKVDKTVE RKSCVECPPC PAPPVAGPSV |
| | | FLFPPKPKDT LMISRTPEVT CVVVDVSHED |
| | | PEVKFNWYVD GVEVHNAKTK PREEQYNSTY |
| | | RVVSVLTVLH QDWLNGKEYK CKVSNKALPS |
| | | SIEKTISKAK GQPREPQVYT LPPSREEMTK |
| | | NQVSLTCLVK GFYPSDIAVE WESNGQPENN |
| | | YKTTPPVLDS DGSFFLYSKL TVDKSRWQQG |
| | | NVFSCSVMHE ALHNHYTQKS LSLSPG |
| 193 | mAb-CD73.6-Vh-hHC-IgG1.1f | QVQLVESGGG VVQPGRSLRL SCAASGFTFS |
| | | NYGMHWVRQA PGKGLEWVAV ILYDSSNKYY |
| | | PDSVKGRFTI SRDNSKNTLY LQMNSLRAED |
| | | TAVYYCARGG SSWYPDSFDI WGQGTMVTVS |
| | | SASTKGPSVF PLAPSSKSTS GGTAALGCLV |
| | | KDYFPEPVTV SWNSGALTSG VHTFPAVLQS |
| | | SGLYSLSSVV TVPSSSLGTQ TYICNVNHKP |
| | | SNTKVDKRVE PKSCDKTHTC PPCPAPEAEG |
| | | APSVFLFPPK PKDTLMISRT PEVTCVVVDV |
| | | SHEDPEVKFN WYVDGVEVHN AKTKPREEQY |
| | | NSTYRVVSVL TVLHQDWLNG KEYKCKVSNK |
| | | ALPSSIEKTI SKAKGQPREP QVYTLPPSRE |
| | | EMTKNQVSLT CLVKGFYPSD IAVEWESNGQ |
| | | PENNYKTTPP VLDSDGSFFL YSKLTVDKSR |
| | | WQQGNVFSCS VMHEALHNHY TQKSLSLSPG |
| 194 | mAb-CD73.6-Vh-hHC-IgG2-C219S | QVQLVESGGG VVQPGRSLRL SCAASGFTFS |
| | | NYGMHWVRQA PGKGLEWVAV ILYDSSNKYY |
| | | PDSVKGRFTI SRDNSKNTLY LQMNSLRAED |
| | | TAVYYCARGG SSWYPDSFDI WGQGTMVTVS |
| | | SASTKGPSVF PLAPCSRSTS ESTAALGCLV |
| | | KDYFPEPVTV SWNSGALTSG VHTFPAVLQS |
| | | SGLYSLSSVV TVPSSNFGTQ TYTCNVDHKP |
| | | SNTKVDKTVE RKSCVECPPC PAPPVAGPSV |
| | | FLFPPKPKDT LMISRTPEVT CVVVDVSHED |
| | | PEVQFNWYVD GVEVHNAKTK PREEQFNSTF |
| | | RVVSVLTVVH QDWLNGKEYK CKVSNKGLPA |
| | | PIEKTISKTK GQPREPQVYT LPPSREEMTK |
| | | NQVSLTCLVK GFYPSDIAVE WESNGQPENN |
| | | YKTTPPMLDS DGSFFLYSKL TVDKSRWQQG |
| | | NVFSCSVMHE ALHNHYTQKS LSLSPG |
| 195 | mAb-CD73.6-Vh-hHC-IgG2-C219S- | QVQLVESGGG VVQPGRSLRL SCAASGFTFS |
| | IgG1.1f | NYGMHWVRQA PGKGLEWVAV ILYDSSNKYY |
| | | PDSVKGRFTI SRDNSKNTLY LQMNSLRAED |
| | | TAVYYCARGG SSWYPDSFDI WGQGTMVTVS |
| | | SASTKGPSVF PLAPCSRSTS ESTAALGCLV |
| | | KDYFPEPVTV SWNSGALTSG VHTFPAVLQS |
| | | SGLYSLSSVV TVPSSNFGTQ TYTCNVDHKP |
| | | SNTKVDKTVE RKSCVECPPC PAPPVAGPSV |
| | | FLFPPKPKDT LMISRTPEVT CVVVDVSHED |
| | | PEVKFNWYVD GVEVHNAKTK PREEQYNSTY |
| | | RVVSVLTVLH QDWLNGKEYK CKVSNKALPS |
| | | SIEKTISKAK GQPREPQVYT LPPSREEMTK |
| | | NQVSLTCLVK GFYPSDIAVE WESNGQPENN |
| | | YKTTPPVLDS DGSFFLYSKL TVDKSRWQQG |
| | | NVFSCSVMHE ALHNHYTQKS LSLSPGK |
| 196 | mAb-CD73.7-Vh-hHC-IgG1.1f | QVQLVESGGG VVQPGRSLRL SCASSGFTFS |
| | | NYGMHWVRQA PGKGLEWVAV ILYDSSNKYY |
| | | PDSVKGRFTI SRDNSKNTLY LQMNSLRAED |
| | | TAVYYCARGG SSWYPDSFDI WGQGTMVTVS |
| | | SASTKGPSVF PLAPSSKSTS GGTAALGCLV |
| | | KDYFPEPVTV SWNSGALTSG VHTFPAVLQS |
| | | SGLYSLSSVV TVPSSSLGTQ TYICNVNHKP |
| | | SNTKVDKRVE PKSCDKTHTC PPCPAPEAEG |
| | | APSVFLFPPK PKDTLMISRT PEVTCVVVDV |
| | | SHEDPEVKFN WYVDGVEVHN AKTKPREEQY |
| | | NSTYRVVSVL TVLHQDWLNG KEYKCKVSNK |
| | | ALPSSIEKTI SKAKGQPREP QVYTLPPSRE |
| | | EMTKNQVSLT CLVKGFYPSD IAVEWESNGQ |
| | | PENNYKTTPP VLDSDGSFFL YSKLTVDKSR |
| | | WQQGNVFSCS VMHEALHNHY TQKSLSLSPG |
| 197 | mAb-CD73.7-Vh-hHC-IgG2-C219S | QVQLVESGGG VVQPGRSLRL SCASSGFTFS |
| | | NYGMHWVRQA PGKGLEWVAV ILYDSSNKYY |
| | | PDSVKGRFTI SRDNSKNTLY LQMNSLRAED |
| | | TAVYYCARGG SSWYPDSFDI WGQGTMVTVS |
| | | SASTKGPSVF PLAPCSRSTS ESTAALGCLV |
| | | KDYFPEPVTV SWNSGALTSG VHTFPAVLQS |
| | | SGLYSLSSVV TVPSSNFGTQ TYTCNVDHKP |
| | | SNTKVDKTVE RKSCVECPPC PAPPVAGPSV |
| | | FLFPPKPKDT LMISRTPEVT CVVVDVSHED |
| | | PEVQFNWYVD GVEVHNAKTK PREEQFNSTF |
| | | RVVSVLTVVH QDWLNGKEYK CKVSNKGLPA |
| | | PIEKTISKTK GQPREPQVYT LPPSREEMTK |
| | | NQVSLTCLVK GFYPSDIAVE WESNGQPENN |
| | | YKTTPPMLDS DGSFFLYSKL TVDKSRWQQG |
| | | NVFSCSVMHE ALHNHYTQKS LSLSPG |
| 198 | mAb-CD73.7-Vh-hHC-IgG2-C219S- | QVQLVESGGG VVQPGRSLRL SCASSGFTFS |
| | IgG1.1f | NYGMHWVRQA PGKGLEWVAV ILYDSSNKYY |
| | | PDSVKGRFTI SRDNSKNTLY LQMNSLRAED |
| | | TAVYYCARGG SSWYPDSFDI WGQGTMVTVS |
| | | SASTKGPSVF PLAPCSRSTS ESTAALGCLV |
| | | KDYFPEPVTV SWNSGALTSG VHTFPAVLQS |
| | | SGLYSLSSVV TVPSSNFGTQ TYTCNVDHKP |
| | | SNTKVDKTVE RKSCVECPPC PAPPVAGPSV |
| | | FLFPPKPKDT LMISRTPEVT CVVVDVSHED |
| | | PEVKFNWYVD GVEVHNAKTK PREEQYNSTY |
| | | RVVSVLTVLH QDWLNGKEYK CKVSNKALPS |
| | | SIEKTISKAK GQPREPQVYT LPPSREEMTK |
| | | NQVSLTCLVK GFYPSDIAVE WESNGQPENN |
| | | YKTTPPVLDS DGSFFLYSKL TVDKSRWQQG |
| | | NVFSCSVMHE ALHNHYTQKS LSLSPG |
| 199 | mAb-CD73.8-Vh-hHC-IgG1.1f | QVQLVESGGG VVQPGRSLRL SCAASGFTFS |
| | | NYGMHWVRQA PGKGLEWVAV IWYDSSNKYY |
| | | PDSVKGRFTI SRDNSKNTLY LQMNSLRAED |
| | | TAVYYCARGG SSWYPDSFDI WGQGTMVTVS |
| | | SASTKGPSVF PLAPSSKSTS GGTAALGCLV |
| | | KDYFPEPVTV SWNSGALTSG VHTFPAVLQS |
| | | SGLYSLSSVV TVPSSSLGTQ TYICNVNHKP |
| | | SNTKVDKRVE PKSCDKTHTC PPCPAPEAEG |
| | | APSVFLFPPK PKDTLMISRT PEVTCVVVDV |
| | | SHEDPEVKFN WYVDGVEVHN AKTKPREEQY |
| | | NSTYRVVSVL TVLHQDWLNG KEYKCKVSNK |
| | | ALPSSIEKTI SKAKGQPREP QVYTLPPSRE |
| | | EMTKNQVSLT CLVKGFYPSD IAVEWESNGQ |
| | | PENNYKTTPP VLDSDGSFFL YSKLTVDKSR |
| | | WQQGNVFSCS VMHEALHNHY TQKSLSLSPG |
| 200 | mAb-CD73.8-Vh-hHC-IgG2-C219S | QVQLVESGGG VVQPGRSLRL SCAASGFTFS |
| | | NYGMHWVRQA PGKGLEWVAV IWYDSSNKYY |
| | | PDSVKGRFTI SRDNSKNTLY LQMNSLRAED |
| | | TAVYYCARGG SSWYPDSFDI WGQGTMVTVS |
| | | SASTKGPSVF PLAPCSRSTS ESTAALGCLV |
| | | KDYFPEPVTV SWNSGALTSG VHTFPAVLQS |
| | | SGLYSLSSVV TVPSSNFGTQ TYTCNVDHKP |
| | | SNTKVDKTVE RKSCVECPPC PAPPVAGPSV |
| | | FLFPPKPKDT LMISRTPEVT CVVVDVSHED |
| | | PEVQFNWYVD GVEVHNAKTK PREEQFNSTF |
| | | RVVSVLTVVH QDWLNGKEYK CKVSNKGLPA |
| | | PIEKTISKTK GQPREPQVYT LPPSREEMTK |
| | | NQVSLTCLVK GFYPSDIAVE WESNGQPENN |
| | | YKTTPPMLDS DGSFFLYSKL TVDKSRWQQG |
| | | NVFSCSVMHE ALHNHYTQKS LSLSPG |
| 201 | mAb-CD73.8-Vh-hHC-IgG2-C219S- | QVQLVESGGG VVQPGRSLRL SCAASGFTFS |
| | IgG1.1f | NYGMHWVRQA PGKGLEWVAV IWYDSSNKYY |
| | | PDSVKGRFTI SRDNSKNTLY LQMNSLRAED |
| | | TAVYYCARGG SSWYPDSFDI WGQGTMVTVS |
| | | SASTKGPSVF PLAPCSRSTS ESTAALGCLV |
| | | KDYFPEPVTV SWNSGALTSG VHTFPAVLQS |
| | | SGLYSLSSVV TVPSSNFGTQ TYTCNVDHKP |
| | | SNTKVDKTVE RKSCVECPPC PAPPVAGPSV |
| | | FLFPPKPKDT LMISRTPEVT CVVVDVSHED |
| | | PEVKFNWYVD GVEVHNAKTK PREEQYNSTY |
| | | RVVSVLTVLH QDWLNGKEYK CKVSNKALPS |
| | | SIEKTISKAK GQPREPQVYT LPPSREEMTK |
| | | NQVSLTCLVK GFYPSDIAVE WESNGQPENN |
| | | YKTTPPVLDS DGSFFLYSKL TVDKSRWQQG |
| | | NVFSCSVMHE ALHNHYTQKS LSLSPG |
| 202 | mAb-CD73.9-Vh-hHC-IgG1.1f | QVQLVESGGG VVQPGRSLRL SCASSGFTFS |
| | | NYGMHWVRQA PGKGLEWVAV IWYDSSNKYY |
| | | PDSVKGRFTI SRDNSKNTLY LQMNSLRAED |
| | | TAVYYCARGG SSWYPDSFDI WGQGTMVTVS |
| | | SASTKGPSVF PLAPSSKSTS GGTAALGCLV |
| | | KDYFPEPVTV SWNSGALTSG VHTFPAVLQS |
| | | SGLYSLSSVV TVPSSSLGTQ TYICNVNHKP |
| | | SNTKVDKRVE PKSCDKTHTC PPCPAPEAEG |
| | | APSVFLFPPK PKDTLMISRT PEVTCVVVDV |
| | | SHEDPEVKFN WYVDGVEVHN AKTKPREEQY |
| | | NSTYRVVSVL TVLHQDWLNG KEYKCKVSNK |
| | | ALPSSIEKTI SKAKGQPREP QVYTLPPSRE |
| | | EMTKNQVSLT CLVKGFYPSD IAVEWESNGQ |
| | | PENNYKTTPP VLDSDGSFFL YSKLTVDKSR |
| | | WQQGNVFSCS VMHEALHNHY TQKSLSLSPG |
| 203 | mAb-CD73.9-Vh-hHC-IgG2-C219S | QVQLVESGGG VVQPGRSLRL SCASSGFTFS |
| | | NYGMHWVRQA PGKGLEWVAV IWYDSSNKYY |
| | | PDSVKGRFTI SRDNSKNTLY LQMNSLRAED |
| | | TAVYYCARGG SSWYPDSFDI WGQGTMVTVS |
| | | SASTKGPSVF PLAPCSRSTS ESTAALGCLV |
| | | KDYFPEPVTV SWNSGALTSG VHTFPAVLQS |
| | | SGLYSLSSVV TVPSSNFGTQ TYTCNVDHKP |
| | | SNTKVDKTVE RKSCVECPPC PAPPVAGPSV |
| | | FLFPPKPKDT LMISRTPEVT CVVVDVSHED |
| | | PEVQFNWYVD GVEVHNAKTK PREEQFNSTF |
| | | RVVSVLTVVH QDWLNGKEYK CKVSNKGLPA |
| | | PIEKTISKTK GQPREPQVYT LPPSREEMTK |
| | | NQVSLTCLVK GFYPSDIAVE WESNGQPENN |
| | | YKTTPPMLDS DGSFFLYSKL TVDKSRWQQG |
| | | NVFSCSVMHE ALHNHYTQKS LSLSPG |
| 204 | mAb-CD73.9-Vh-hHC-IgG2-C219S- | QVQLVESGGG VVQPGRSLRL SCASSGFTFS |
| | IgG1.1f | NYGMHWVRQA PGKGLEWVAV IWYDSSNKYY |
| | | PDSVKGRFTI SRDNSKNTLY LQMNSLRAED |
| | | TAVYYCARGG SSWYPDSFDI WGQGTMVTVS |
| | | SASTKGPSVF PLAPCSRSTS ESTAALGCLV |
| | | KDYFPEPVTV SWNSGALTSG VHTFPAVLQS |
| | | SGLYSLSSVV TVPSSNFGTQ TYTCNVDHKP |
| | | SNTKVDKTVE RKSCVECPPC PAPPVAGPSV |
| | | FLFPPKPKDT LMISRTPEVT CVVVDVSHED |
| | | PEVKFNWYVD GVEVHNAKTK PREEQYNSTY |
| | | RVVSVLTVLH QDWLNGKEYK CKVSNKALPS |
| | | SIEKTISKAK GQPREPQVYT LPPSREEMTK |
| | | NQVSLTCLVK GFYPSDIAVE WESNGQPENN |
| | | YKTTPPVLDS DGSFFLYSKL TVDKSRWQQG |
| | | NVFSCSVMHE ALHNHYTQKS LSLSPG |
| 205 | mAb-CD73.10-Vh-hHC-IgG1.1f | QVQLVESGGG VVQPGRSLRL SCAASGFTFS |
| | | NYGMHWVRQA PGKGLEWVAV IWYDESNKYY |
| | | PDSVKGRFTI SRDNSKNTLY LQMNSLRAED |
| | | TAVYYCARGG SSWYPDSFDI WGQGTMVTVS |
| | | SASTKGPSVF PLAPSSKSTS GGTAALGCLV |
| | | KDYFPEPVTV SWNSGALTSG VHTFPAVLQS |
| | | SGLYSLSSVV TVPSSSLGTQ TYICNVNHKP |
| | | SNTKVDKRVE PKSCDKTHTC PPCPAPEAEG |
| | | APSVFLFPPK PKDTLMISRT PEVTCVVVDV |
| | | SHEDPEVKFN WYVDGVEVHN AKTKPREEQY |
| | | NSTYRVVSVL TVLHQDWLNG KEYKCKVSNK |
| | | ALPSSIEKTI SKAKGQPREP QVYTLPPSRE |
| | | EMTKNQVSLT CLVKGFYPSD IAVEWESNGQ |
| | | PENNYKTTPP VLDSDGSFFL YSKLTVDKSR |
| | | WQQGNVFSCS VMHEALHNHY TQKSLSLSPG |
| 206 | mAb-CD73.10-Vh-hHC-IgG2-C219S | QVQLVESGGG VVQPGRSLRL SCAASGFTFS |
| | | NYGMHWVRQA PGKGLEWVAV IWYDESNKYY |
| | | PDSVKGRFTI SRDNSKNTLY LQMNSLRAED |
| | | TAVYYCARGG SSWYPDSFDI WGQGTMVTVS |
| | | SASTKGPSVF PLAPCSRSTS ESTAALGCLV |
| | | KDYFPEPVTV SWNSGALTSG VHTFPAVLQS |
| | | SGLYSLSSVV TVPSSNFGTQ TYTCNVDHKP |
| | | SNTKVDKTVE RKSCVECPPC PAPPVAGPSV |
| | | FLFPPKPKDT LMISRTPEVT CVVVDVSHED |
| | | PEVQFNWYVD GVEVHNAKTK PREEQFNSTF |
| | | RVVSVLTVVH QDWLNGKEYK CKVSNKGLPA |
| | | PIEKTISKTK GQPREPQVYT LPPSREEMTK |
| | | NQVSLTCLVK GFYPSDIAVE WESNGQPENN |
| | | YKTTPPMLDS DGSFFLYSKL TVDKSRWQQG |
| | | NVFSCSVMHE ALHNHYTQKS LSLSPG |
| 207 | mAb-CD73.10-Vh-hHC-IgG2-C219S- | QVQLVESGGG VVQPGRSLRL SCAASGFTFS |
| | IgG1.1f | NYGMHWVRQA PGKGLEWVAV IWYDESNKYY |
| | | PDSVKGRFTI SRDNSKNTLY LQMNSLRAED |
| | | TAVYYCARGG SSWYPDSFDI WGQGTMVTVS |
| | | SASTKGPSVF PLAPCSRSTS ESTAALGCLV |
| | | KDYFPEPVTV SWNSGALTSG VHTFPAVLQS |
| | | SGLYSLSSVV TVPSSNFGTQ TYTCNVDHKP |
| | | SNTKVDKTVE RKSCVECPPC PAPPVAGPSV |
| | | FLFPPKPKDT LMISRTPEVT CVVVDVSHED |
| | | PEVKFNWYVD GVEVHNAKTK PREEQYNSTY |
| | | RVVSVLTVLH QDWLNGKEYK CKVSNKALPS |
| | | SIEKTISKAK GQPREPQVYT LPPSREEMTK |
| | | NQVSLTCLVK GFYPSDIAVE WESNGQPENN |
| | | YKTTPPVLDS DGSFFLYSKL TVDKSRWQQG |
| | | NVFSCSVMHE ALHNHYTQKS LSLSPG |
| 208 | mAb-CD73.11-Vh-hHC-IgG1.1f | QVQLVESGGG VVQPGRSLRL SCAASGFTFS |
| | | NYGMHWVRQA PGKGLEWVAV IWYDESNKYY |
| | | ADSVKGRFTI SRDNSKNTLF LQMNSLRAED |
| | | TAVYYCARGY NSRWYPDAFD IWGQGTMVTV |
| | | SSASTKGPSV FPLAPSSKST SGGTAALGCL |
| | | VKDYFPEPVT VSWNSGALTS GVHTFPAVLQ |
| | | SSGLYSLSSV VTVPSSSLGT QTYICNVNHK |
| | | PSNTKVDKRV EPKSCDKTHT CPPCPAPEAE |
| | | GAPSVFLFPP KPKDTLMISR TPEVTCVVVD |
| | | VSHEDPEVKF NWYVDGVEVH NAKTKPREEQ |
| | | YNSTYRVVSV LTVLHQDWLN GKEYKCKVSN |
| | | KALPSSIEKT ISKAKGQPRE PQVYTLPPSR |
| | | EEMTKNQVSL TCLVKGFYPS DIAVEWESNG |
| | | QPENNYKTTP PVLDSDGSFF LYSKLTVDKS |
| | | RWQQGNVFSC SVMHEALHNH YTQKSLSLSPG |
| 209 | mAb-CD73.11-Vh-hHC-IgG2-C219S | QVQLVESGGG VVQPGRSLRL SCAASGFTFS |
| | | NYGMHWVRQA PGKGLEWVAV IWYDESNKYY |
| | | ADSVKGRFTI SRDNSKNTLF LQMNSLRAED |
| | | TAVYYCARGY NSRWYPDAFD IWGQGTMVTV |
| | | SSASTKGPSV FPLAPCSRST SESTAALGCL |
| | | VKDYFPEPVT VSWNSGALTS GVHTFPAVLQ |
| | | SSGLYSLSSV VTVPSSNFGT QTYTCNVDHK |
| | | PSNTKVDKTV ERKSCVECPP CPAPPVAGPS |
| | | VFLFPPKPKD TLMISRTPEV TCVVVDVSHE |
| | | DPEVQFNWYV DGVEVHNAKT KPREEQFNST |
| | | FRVVSVLTVV HQDWLNGKEY KCKVSNKGLP |
| | | APIEKTISKT KGQPREPQVY TLPPSREEMT |
| | | KNQVSLTCLV KGFYPSDIAV EWESNGQPEN |
| | | NYKTTPPMLD SDGSFFLYSK LTVDKSRWQQ |
| | | GNVFSCSVMH EALHNHYTQK SLSLSPG |
| 210 | mAb-CD73.11-Vh-hHC-IgG2-C219S- | QVQLVESGGG VVQPGRSLRL SCAASGFTFS |
| | IgG1.1f | NYGMHWVRQA PGKGLEWVAV IWYDESNKYY |
| | | ADSVKGRFTI SRDNSKNTLF LQMNSLRAED |
| | | TAVYYCARGY NSRWYPDAFD IWGQGTMVTV |
| | | SSASTKGPSV FPLAPCSRST SESTAALGCL |
| | | VKDYFPEPVT VSWNSGALTS GVHTFPAVLQ |
| | | SSGLYSLSSV VTVPSSNFGT QTYTCNVDHK |
| | | PSNTKVDKTV ERKSCVECPP CPAPPVAGPS |
| | | VFLFPPKPKD TLMISRTPEV TCVVVDVSHE |
| | | DPEVKFNWYV DGVEVHNAKT KPREEQYNST |
| | | YRVVSVLTVL HQDWLNGKEY KCKVSNKALP |
| | | SSIEKTISKA KGQPREPQVY TLPPSREEMT |
| | | KNQVSLTCLV KGFYPSDIAV EWESNGQPEN |
| | | NYKTTPPVLD SDGSFFLYSK LTVDKSRWQQ |
| | | GNVFSCSVMH EALHNHYTQK SLSLSPG |
| 211 | mAb-CD73.3-Vh-hHC-IgG1.1f | gaagtgcagctggtggagtctgggggaggcttggtacagcctggcaggtccct |
| | | gagactctcctgtgcagcctctggattcacattgatgattatgccatgcactgggt |
| | | ccggcaagctccagggaagggcctggagtgggtctcaggtattagttggaaga |
| | | gtggtagcataggctatgcggactctgtgaagggccgattcaccatctccagag |
| | | acaacgccaagaactccctgtatctgcaaatgaacagtctgagagctgaggaca |
| | | cggccttgtattactgtgccaaagggtattacgttattttgactggccttgactactg |
| | | gggccagggaaccctggtcaccgtctcctcagcgtcgaccaagggcccctccg |
| | | tgtttcctctggccccttccagcaagtccacctctggcggaacagccgctctggg |
| | | ctgcctggtcaaggactacttccccgagcctgtgaccgtgtcctggaactctggc |
| | | gccctgacatctggcgtgcacaccttccctgctgtgctgcagtctagcggcctgt |
| | | actccctgtcctccgtcgtgacagtgccctccagctctctgggcacccagaccta |
| | | catctgcaacgtgaaccacaagccctccaacaccaaggtggacaagcgggtg |
| | | gaacccaagtcctgcgacaagacccatacctgccctccctgccctgctcctgaa |
| | | gctgaaggcgcccctagcgtgttcctgttccctccaaagcccaaggacaccctg |
| | | atgatctcccggacccctgaagtgacctgcgtggtggtggatgtgtcccacgag |
| | | gacccagaagtgaagttcaattggtacgtggacggcgtggaagtgcacaacgc |
| | | caagaccaagcctagagaggaacagtacaactccacctaccgggtggtgtccg |
| | | tgctgaccgtgctgcaccaggattggctgaacggcaaagagtacaagtgcaag |
| | | gtgtccaacaaggccctgcctagctccatcgaaaagaccatctccaaggctaag |
| | | ggccagccccgcgagccccaggtgtacacactgcctccatcccgggaagaga |
| | | tgaccaagaaccaggtgtccctgacttgcctcgtgaagggcttctacccctccga |
| | | tatcgccgtggaatgggagtccaacggccagcctgagaacaactacaagacca |
| | | cccctcccgtgctggactccgacggctcattcttcctgtacagcaagctgacagt |
| | | ggataagtcccggtggcagcaggggaacgtgttctcctgctccgtgatgcacga |
| | | ggctctgcacaaccactacacacagaagtccctgtctctgtcccctggc |
| 212 | mAb-CD73.3-Vh-hHC-IgG2-C219S | gaagtgcagctggtggagtctgggggaggcttggtacagcctggcaggtccct |
| | | gagactctcctgtgcagcctctggattcacattgatgattatgccatgcactgggt |
| | | ccggcaagctccagggaagggcctggagtgggtctcaggtattagttggaaga |
| | | gtggtagcataggctatgcggactctgtgaagggccgattcaccatctccagag |
| | | acaacgccaagaactccctgtatctgcaaatgaacagtctgagagctgaggaca |
| | | cggccttgtattactgtgccaaagggtattacgttattttgactggccttgactactg |
| | | gggccagggaaccctggtcaccgtctcctcagcgtcgaccaagggcccctctg |
| | | tgtttcctctggccccttgctcccggtccacctctgagtctaccgctgctctgggct |
| | | gcctggtcaaggactacttccccgagcctgtgaccgtgtcctggaactctggcg |
| | | ctctgacctccggcgtgcacacctttccagccgtgctgcagtcctccggcctgta |
| | | ctctctgtcctccgtcgtgaccgtgccctcctccaacttcggcacccagacctaca |
| | | cctgtaacgtggaccacaagccctccaacaccaaggtggacaagaccgtggaa |
| | | cggaagtcctgcgtggaatgccctccttgccctgcacctcctgtggctggccctt |
| | | ccgtgttcctgttccccccaaagcccaaggacaccctgatgatctcccggaccc |
| | | ccgaagtgacctgcgtggtggtggatgtgtcccacgaggaccccgaggtgcag |
| | | ttcaattggtacgtggacggcgtggaagtgcacaacgccaagaccaagcccag |
| | | agaggaacagttcaactccaccttccgggtggtgtccgtgctgaccgtggtgca |
| | | ccaggactggctgaacggcaaagagtacaagtgcaaggtgtccaacaagggc |
| | | ctgcctgcccccatcgaaaagaccatctccaagacaaagggccagccccgcg |
| | | agcctcaggtgtacacactgcctcccagccgggaagagatgaccaagaacca |
| | | ggtgtccctgacctgtctggtcaagggcttctacccctccgatatcgccgtggaat |
| | | gggagtccaacggccagcccgagaacaactacaagaccaccccccccatgct |
| | | ggactccgacggctcattcttcctgtactccaagctgacagtggacaagtcccgg |
| | | tggcagcagggcaacgtgttctcctgctctgtgatgcacgaggccctgcacaac |
| | | cactacacccagaagtccctgtccctgagccccggcaa |
| 213 | mAb-CD73.3-Vh-hHC-IgG2-C219S- | gaagtgcagctggtggagtctgggggaggcttggtacagcctggcaggtccct |
| | IgG1.1f | gagactctcctgtgcagcctctggattcacattgatgattatgccatgcactgggt |
| | | ccggcaagctccagggaagggcctggagtgggtctcaggtattagttggaaga |
| | | gtggtagcataggctatgcggactctgtgaagggccgattcaccatctccagag |
| | | acaacgccaagaactccctgtatctgcaaatgaacagtctgagagctgaggaca |
| | | cggccttgtattactgtgccaaagggtattacgttattttgactggccttgactactg |
| | | gggccagggaaccctggtcaccgtctcctcagcgtcgaccaagggcccatcg |
| | | gtcttccccctggcgccctgctccaggagcacctccgagagcacagcggccct |
| | | gggctgcctggtcaaggactacttccccgaaccggtgacggtgtcgtggaactc |
| | | aggcgctctgaccagcggcgtgcacaccttcccagctgtcctacagtcctcagg |
| | | actctactccctcagcagcgtggtgaccgtgccctccagcaacttcggcaccca |
| | | gacctacacctgcaacgtagatcacaagcccagcaacaccaaggtggacaag |
| | | acagttgagcgcaaatcctgtgtcgagtgcccaccgtgcccagcaccacctgtg |
| | | gcaggaccgtcagtcttcctcttccccccaaaacccaaggacaccctcatgatct |
| | | cccggacccctgaggtcacatgcgtggtggtggacgtgagccacgaagaccct |
| | | gaggtcaagttcaactggtacgtggacggcgtggaggtgcataatgccaagac |
| | | aaagccgcgggaggagcagtacaacagcacgtaccgtgtggtcagcgtcctc |
| | | accgtcctgcaccaggactggctgaatggcaaggagtacaagtgcaaggtctc |
| | | caacaaagccctcccaagcagcatcgagaaaaccatctccaaagccaaaggg |
| | | cagccccgagaaccacaggtgtacaccctgcccccatcccgggaggagatga |
| | | ccaagaaccaggtcagcctgacctgcctggtcaaaggcttctatcccagcgaca |
| | | tcgccgtggagtgggagagcaatgggcagccggagaacaactacaagaccac |
| | | gcctcccgtgctggactccgacggctccttcttcctctatagcaagctcaccgtgg |
| | | acaagagcaggtggcagcaggggaacgtcttctcatgctccgtgatgcatgag |
| | | gctctgcacaaccactacacgcagaagagcctctccctgtccccgggtaaa |
| 214 | mAb-CD73.4-Vh-hHC-IgG1.1f | caggtgcagctggtggagtctgggggaggcgtggtccagcctgggaggtccc |
| | | tgagactctcctgtgcagcctctggattcaccttcagtaactatggcatgcactgg |
| | | gtccgccaggctccaggcaaggggctggagtgggtggcagttatattgtatgat |
| | | ggaagtaataaatactatccagactccgtgaagggccgattcaccatctccagag |
| | | acaattccaagaacacgctgtatctgcaaatgaacagcctgagagccgaggac |
| | | acggctgtgtattactgtgcgagagggggcagcagctggtaccctgattcttttga |
| | | tatctggggccaaggaacaatggtcaccgtctcttcagcgtcgaccaagggccc |
| | | ctccgtgtttcctctggccccttccagcaagtccacctctggcggaacagccgct |
| | | ctgggctgcctggtcaaggactacttccccgagcctgtgaccgtgtcctggaact |
| | | ctggcgccctgacatctggcgtgcacaccttccctgctgtgctgcagtctagcgg |
| | | cctgtactccctgtcctccgtcgtgacagtgccctccagctctctgggcacccag |
| | | acctacatctgcaacgtgaaccacaagccctccaacaccaaggtggacaagcg |
| | | ggtggaacccaagtcctgcgacaagacccatacctgccctccctgccctgctcc |
| | | tgaagctgaaggcgcccctagcgtgttcctgttccctccaaagcccaaggacac |
| | | cctgatgatctcccggacccctgaagtgacctgcgtggtggtggatgtgtcccac |
| | | gaggacccagaagtgaagttcaattggtacgtggacggcgtggaagtgcacaa |
| | | cgccaagaccaagcctagagaggaacagtacaactccacctaccgggtggtgt |
| | | ccgtgctgaccgtgctgcaccaggattggctgaacggcaaagagtacaagtgc |
| | | aaggtgtccaacaaggccctgcctagctccatcgaaaagaccatctccaaggct |
| | | aagggccagccccgcgagccccaggtgtacacactgcctccatcccgggaag |
| | | agatgaccaagaaccaggtgtccctgacttgcctcgtgaagggcttctacccctc |
| | | cgatatcgccgtggaatgggagtccaacggccagcctgagaacaactacaaga |
| | | ccacccctcccgtgctggactccgacggctcattcttcctgtacagcaagctgac |
| | | agtggataagtcccggtggcagcaggggaacgtgttctcctgctccgtgatgca |
| | | cgaggctctgcacaaccactacacacagaagtccctgtctctgtcccctggc |
| 215 | mAb-CD73.4-Vh-hHC-IgG2-C219S | caggtgcagctggtggagtctgggggaggcgtggtccagcctgggaggtccc |
| | | tgagactctcctgtgcagcctctggattcaccttcagtaactatggcatgcactgg |
| | | gtccgccaggctccaggcaaggggctggagtgggtggcagttatattgtatgat |
| | | ggaagtaataaatactatccagactccgtgaagggccgattcaccatctccagag |
| | | acaattccaagaacacgctgtatctgcaaatgaacagcctgagagccgaggac |
| | | acggctgtgtattactgtgcgagagggggcagcagctggtaccctgattcttttga |
| | | tatctggggccaaggaacaatggtcaccgtctcttcagcgtcgaccaagggccc |
| | | ctctgtgtttcctctggccccttgctcccggtccacctctgagtctaccgctgctctg |
| | | ggctgcctggtcaaggactacttccccgagcctgtgaccgtgtcctggaactctg |
| | | gcgctctgacctccggcgtgcacacctttccagccgtgctgcagtcctccggcct |
| | | gtactctctgtcctccgtcgtgaccgtgccctcctccaacttcggcacccagacct |
| | | acacctgtaacgtggaccacaagccctccaacaccaaggtggacaagaccgtg |
| | | gaacggaagtcctgcgtggaatgccctccttgccctgcacctcctgtggctggc |
| | | ccttccgtgttcctgttccccccaaagcccaaggacaccctgatgatctcccgga |
| | | cccccgaagtgacctgcgtggtggtggatgtgtcccacgaggaccccgaggtg |
| | | cagttcaattggtacgtggacggcgtggaagtgcacaacgccaagaccaagcc |
| | | cagagaggaacagttcaactccaccttccgggtggtgtccgtgctgaccgtggt |
| | | gcaccaggactggctgaacggcaaagagtacaagtgcaaggtgtccaacaag |
| | | ggcctgcctgcccccatcgaaaagaccatctccaagacaaagggccagcccc |
| | | gcgagcctcaggtgtacacactgcctcccagccgggaagagatgaccaagaa |
| | | ccaggtgtccctgacctgtctggtcaagggcttctacccctccgatatcgccgtg |
| | | gaatgggagtccaacggccagcccgagaacaactacaagaccacccccccca |
| | | tgctggactccgacggctcattcttcctgtactccaagctgacagtggacaagtcc |
| | | cggtggcagcagggcaacgtgttctcctgctctgtgatgcacgaggccctgcac |
| | | aaccactacacccagaagtccctgtccctgagccccggcaaa |
| 216 | mAb-CD73.4-Vh-hHC-IgG2-C219S- | caggtgcagctggtggagtctgggggaggcgtggtccagcctgggaggtccc |
| | IgG1.1f | tgagactctcctgtgcagcctctggattcaccttcagtaactatggcatgcactgg |
| | | gtccgccaggctccaggcaaggggctggagtgggtggcagttatattgtatgat |
| | | ggaagtaataaatactatccagactccgtgaagggccgattcaccatctccagag |
| | | acaattccaagaacacgctgtatctgcaaatgaacagcctgagagccgaggac |
| | | acggctgtgtattactgtgcgagagggggcagcagctggtaccctgattcttttga |
| | | tatctggggccaaggaacaatggtcaccgtctcttcagcgtcgaccaagggccc |
| | | atcggtcttccccctggcgccctgctccaggagcacctccgagagcacagcgg |
| | | ccctgggctgcctggtcaaggactacttccccgaaccggtgacggtgtcgtgga |
| | | actcaggcgctctgaccagcggcgtgcacaccttcccagctgtcctacagtcctc |
| | | aggactctactccctcagcagcgtggtgaccgtgccctccagcaacttcggcac |
| | | ccagacctacacctgcaacgtagatcacaagcccagcaacaccaaggtggaca |
| | | agacagttgagcgcaaatcctgtgtcgagtgcccaccgtgcccagcaccacctg |
| | | tggcaggaccgtcagtcttcctcttccccccaaaacccaaggacaccctcatgat |
| | | ctcccggacccctgaggtcacatgcgtggtggtggacgtgagccacgaagacc |
| | | ctgaggtcaagttcaactggtacgtggacggcgtggaggtgcataatgccaaga |
| | | caaagccgcgggaggagcagtacaacagcacgtaccgtgtggtcagcgtcct |
| | | caccgtcctgcaccaggactggctgaatggcaaggagtacaagtgcaaggtct |
| | | ccaacaaagccctcccaagcagcatcgagaaaaccatctccaaagccaaagg |
| | | gcagccccgagaaccacaggtgtacaccctgcccccatcccgggaggagatg |
| | | accaagaaccaggtcagcctgacctgcctggtcaaaggcttctatcccagcgac |
| | | atcgccgtggagtgggagagcaatgggcagccggagaacaactacaagacca |
| | | cgcctcccgtgctggactccgacggctccttcttcctctatagcaagctcaccgtg |
| | | gacaagagcaggtggcagcaggggaacgtcttctcatgctccgtgatgcatga |
| | | ggctctgcacaaccactacacgcagaagagcctctccctgtccccgggtaaa |
| 217 | mAb-CD73.5-Vh-hHC-IgG1.1f | caggtgcagctggtggagtctgggggaggcgtggtccagcctgggaggtccc |
| | | tgagactctcctgtgcaagctctggattcaccttcagtaactatggcatgcactgg |
| | | gtccgccaggctccaggcaaggggctggagtgggtggcagttatattgtatgat |
| | | ggaagtaataaatactatccagactccgtgaagggccgattcaccatctccagag |
| | | acaattccaagaacacgctgtatctgcaaatgaacagcctgagagccgaggac |
| | | acggctgtgtattactgtgcgagagggggcagcagctggtaccctgattcttttga |
| | | tatctggggccaaggaacaatggtcaccgtctcttcagcgtcgaccaagggccc |
| | | ctccgtgtttcctctggccccttccagcaagtccacctctggcggaacagccgct |
| | | ctgggctgcctggtcaaggactacttccccgagcctgtgaccgtgtcctggaact |
| | | ctggcgccctgacatctggcgtgcacaccttccctgctgtgctgcagtctagcgg |
| | | cctgtactccctgtcctccgtcgtgacagtgccctccagctctctgggcacccag |
| | | acctacatctgcaacgtgaaccacaagccctccaacaccaaggtggacaagcg |
| | | ggtggaacccaagtcctgcgacaagacccatacctgccctccctgccctgctcc |
| | | tgaagctgaaggcgcccctagcgtgttcctgttccctccaaagcccaaggacac |
| | | cctgatgatctcccggacccctgaagtgacctgcgtggtggtggatgtgtcccac |
| | | gaggacccagaagtgaagttcaattggtacgtggacggcgtggaagtgcacaa |
| | | cgccaagaccaagcctagagaggaacagtacaactccacctaccgggtggtgt |
| | | ccgtgctgaccgtgctgcaccaggattggctgaacggcaaagagtacaagtgc |
| | | aaggtgtccaacaaggccctgcctagctccatcgaaaagaccatctccaaggct |
| | | aagggccagccccgcgagccccaggtgtacacactgcctccatcccgggaag |
| | | agatgaccaagaaccaggtgtccctgacttgcctcgtgaagggcttctacccctc |
| | | cgatatcgccgtggaatgggagtccaacggccagcctgagaacaactacaaga |
| | | ccacccctcccgtgctggactccgacggctcattcttcctgtacagcaagctgac |
| | | agtggataagtcccggtggcagcaggggaacgtgttctcctgctccgtgatgca |
| | | cgaggctctgcacaaccactacacacagaagtccctgtctctgtcccctggc |
| 218 | mAb-CD73.5-Vh-hHC-IgG2-C219S | caggtgcagctggtggagtctgggggaggcgtggtccagcctgggaggtccc |
| | | tgagactctcctgtgcaagctctggattcaccttcagtaactatggcatgcactgg |
| | | gtccgccaggctccaggcaaggggctggagtgggtggcagttatattgtatgat |
| | | ggaagtaataaatactatccagactccgtgaagggccgattcaccatctccagag |
| | | acaattccaagaacacgctgtatctgcaaatgaacagcctgagagccgaggac |
| | | acggctgtgtattactgtgcgagagggggcagcagctggtaccctgattcttttga |
| | | tatctggggccaaggaacaatggtcaccgtctcttcagcgtcgaccaagggccc |
| | | ctctgtgtttcctctggccccttgctcccggtccacctctgagtctaccgctgctctg |
| | | ggctgcctggtcaaggactacttccccgagcctgtgaccgtgtcctggaactctg |
| | | gcgctctgacctccggcgtgcacacctttccagccgtgctgcagtcctccggcct |
| | | gtactctctgtcctccgtcgtgaccgtgccctcctccaacttcggcacccagacct |
| | | acacctgtaacgtggaccacaagccctccaacaccaaggtggacaagaccgtg |
| | | gaacggaagtcctgcgtggaatgccctccttgccctgcacctcctgtggctggc |
| | | ccttccgtgttcctgttccccccaaagcccaaggacaccctgatgatctcccgga |
| | | cccccgaagtgacctgcgtggtggtggatgtgtcccacgaggaccccgaggtg |
| | | cagttcaattggtacgtggacggcgtggaagtgcacaacgccaagaccaagcc |
| | | cagagaggaacagttcaactccaccttccgggtggtgtccgtgctgaccgtggt |
| | | gcaccaggactggctgaacggcaaagagtacaagtgcaaggtgtccaacaag |
| | | ggcctgcctgcccccatcgaaaagaccatctccaagacaaagggccagcccc |
| | | gcgagcctcaggtgtacacactgcctcccagccgggaagagatgaccaagaa |
| | | ccaggtgtccctgacctgtctggtcaagggcttctacccctccgatatcgccgtg |
| | | gaatgggagtccaacggccagcccgagaacaactacaagaccacccccccca |
| | | tgctggactccgacggctcattcttcctgtactccaagctgacagtggacaagtcc |
| | | cggtggcagcagggcaacgtgttctcctgctctgtgatgcacgaggccctgcac |
| | | aaccactacacccagaagtccctgtccctgagccccggcaaa |
| 219 | mAb-CD73.5-Vh-hHC-IgG2-C219S- | caggtgcagctggtggagtctgggggaggcgtggtccagcctgggaggtccc |
| | IgG1.1f | tgagactctcctgtgcaagctctggattcaccttcagtaactatggcatgcactgg |
| | | gtccgccaggctccaggcaaggggctggagtgggtggcagttatattgtatgat |
| | | ggaagtaataaatactatccagactccgtgaagggccgattcaccatctccagag |
| | | acaattccaagaacacgctgtatctgcaaatgaacagcctgagagccgaggac |
| | | acggctgtgtattactgtgcgagagggggcagcagctggtaccctgattcttttga |
| | | tatctggggccaaggaacaatggtcaccgtctcttcagcgtcgaccaagggccc |
| | | atcggtcttccccctggcgccctgctccaggagcacctccgagagcacagcgg |
| | | ccctgggctgcctggtcaaggactacttccccgaaccggtgacggtgtcgtgga |
| | | actcaggcgctctgaccagcggcgtgcacaccttcccagctgtcctacagtcctc |
| | | aggactctactccctcagcagcgtggtgaccgtgccctccagcaacttcggcac |
| | | ccagacctacacctgcaacgtagatcacaagcccagcaacaccaaggtggaca |
| | | agacagttgagcgcaaatcctgtgtcgagtgcccaccgtgcccagcaccacctg |
| | | tggcaggaccgtcagtcttcctcttccccccaaaacccaaggacaccctcatgat |
| | | ctcccggacccctgaggtcacatgcgtggtggtggacgtgagccacgaagacc |
| | | ctgaggtcaagttcaactggtacgtggacggcgtggaggtgcataatgccaaga |
| | | caaagccgcgggaggagcagtacaacagcacgtaccgtgtggtcagcgtcct |
| | | caccgtcctgcaccaggactggctgaatggcaaggagtacaagtgcaaggtct |
| | | ccaacaaagccctcccaagcagcatcgagaaaaccatctccaaagccaaagg |
| | | gcagccccgagaaccacaggtgtacaccctgcccccatcccgggaggagatg |
| | | accaagaaccaggtcagcctgacctgcctggtcaaaggcttctatcccagcgac |
| | | atcgccgtggagtgggagagcaatgggcagccggagaacaactacaagacca |
| | | cgcctcccgtgctggactccgacggctccttcttcctctatagcaagctcaccgtg |
| | | gacaagagcaggtggcagcaggggaacgtcttctcatgctccgtgatgcatga |
| | | ggctctgcacaaccactacacgcagaagagcctctccctgtccccgggtaaa |
| 220 | mAb-CD73.6-Vh-hHC-IgG1.1f | ggcatgcactgggtccgccaggctccaggcaaggggctggagtgggtggcag |
| | | ttatattgtatgattccagtaataaatactatccagactccgtgaagggccgattca |
| | | ccatctccagagacaattccaagaacacgctgtatctgcaaatgaacagcctga |
| | | gagccgaggacacggctgtgtattactgtgcgagagggggcagcagctggtac |
| | | cctgattcttttgatatctggggccaaggaacaatggtcaccgtctcttcagcgtcg |
| | | accaagggcccctccgtgtttcctctggccccttccagcaagtccacctctggcg |
| | | gaacagccgctctgggctgcctggtcaaggactacttccccgagcctgtgaccg |
| | | tgtcctggaactctggcgccctgacatctggcgtgcacaccttccctgctgtgctg |
| | | cagtctagcggcctgtactccctgtcctccgtcgtgacagtgccctccagctctct |
| | | gggcacccagacctacatctgcaacgtgaaccacaagccctccaacaccaagg |
| | | tggacaagcgggtggaacccaagtcctgcgacaagacccatacctgccctccc |
| | | tgccctgctcctgaagctgaaggcgcccctagcgtgttcctgttccctccaaagc |
| | | ccaaggacaccctgatgatctcccggacccctgaagtgacctgcgtggtggtgg |
| | | atgtgtcccacgaggacccagaagtgaagttcaattggtacgtggacggcgtgg |
| | | aagtgcacaacgccaagaccaagcctagagaggaacagtacaactccacctac |
| | | cgggtggtgtccgtgctgaccgtgctgcaccaggattggctgaacggcaaaga |
| | | gtacaagtgcaaggtgtccaacaaggccctgcctagctccatcgaaaagaccat |
| | | ctccaaggctaagggccagccccgcgagccccaggtgtacacactgcctccat |
| | | cccgggaagagatgaccaagaaccaggtgtccctgacttgcctcgtgaagggc |
| | | ttctacccctccgatatcgccgtggaatgggagtccaacggccagcctgagaac |
| | | aactacaagaccacccctcccgtgctggactccgacggctcattcttcctgtaca |
| | | gcaagctgacagtggataagtcccggtggcagcaggggaacgtgttctcctgct |
| | | ccgtgatgcacgaggctctgcacaaccactacacacagaagtccctgtctctgtc |
| | | ccctggc |
| 221 | mAb-CD73.6-Vh-hHC-IgG2-C219S | caggtgcagctggtggagtctgggggaggcgtggtccagcctgggaggtccct |
| | | gagactctcctgtgcagcctctggattcaccttcagtaactatggcatgcactggg |
| | | tccgccaggctccaggcaaggggctggagtgggtggcagttatattgtatgattc |
| | | cagtaataaatactatccagactccgtgaagggccgattcaccatctccagagac |
| | | aattccaagaacacgctgtatctgcaaatgaacagcctgagagccgaggacac |
| | | ggctgtgtattactgtgcgagagggggcagcagctggtaccctgattcttttgata |
| | | tctggggccaaggaacaatggtcaccgtctcttcagcgtcgaccaagggcccct |
| | | ctgtgtttcctctggccccttgctcccggtccacctctgagtctaccgctgctctgg |
| | | gctgcctggtcaaggactacttccccgagcctgtgaccgtgtcctggaactctgg |
| | | cgctctgacctccggcgtgcacacctttccagccgtgctgcagtcctccggcctg |
| | | tactctctgtcctccgtcgtgaccgtgccctcctccaacttcggcacccagaccta |
| | | cacctgtaacgtggaccacaagccctccaacaccaaggtggacaagaccgtgg |
| | | aacggaagtcctgcgtggaatgccctccttgccctgcacctcctgtggctggccc |
| | | ttccgtgttcctgttccccccaaagcccaaggacaccctgatgatctcccggacc |
| | | cccgaagtgacctgcgtggtggtggatgtgtcccacgaggaccccgaggtgca |
| | | gttcaattggtacgtggacggcgtggaagtgcacaacgccaagaccaagccca |
| | | gagaggaacagttcaactccaccttccgggtggtgtccgtgctgaccgtggtgc |
| | | accaggactggctgaacggcaaagagtacaagtgcaaggtgtccaacaaggg |
| | | cctgcctgcccccatcgaaaagaccatctccaagacaaagggccagccccgc |
| | | gagcctcaggtgtacacactgcctcccagccgggaagagatgaccaagaacc |
| | | aggtgtccctgacctgtctggtcaagggcttctacccctccgatatcgccgtgga |
| | | atgggagtccaacggccagcccgagaacaactacaagaccaccccccccatg |
| | | ctggactccgacggctcattcttcctgtactccaagctgacagtggacaagtccc |
| | | ggtggcagcagggcaacgtgttctcctgctctgtgatgcacgaggccctgcaca |
| | | accactacacccagaagtccctgtccctgagccccggcaaa |
| 222 | mAb-CD73.6-Vh-hHC-IgG2-C219S- | caggtgcagctggtggagtctgggggaggcgtggtccagcctgggaggtccct |
| | IgG1.1f | gagactctcctgtgcagcctctggattcaccttcagtaactatggcatgcactggg |
| | | tccgccaggctccaggcaaggggctggagtgggtggcagttatattgtatgattc |
| | | cagtaataaatactatccagactccgtgaagggccgattcaccatctccagagac |
| | | aattccaagaacacgctgtatctgcaaatgaacagcctgagagccgaggacac |
| | | ggctgtgtattactgtgcgagagggggcagcagctggtaccctgattcttttgata |
| | | tctggggccaaggaacaatggtcaccgtctcttcagcgtcgaccaagggcccat |
| | | cggtcttccccctggcgccctgctccaggagcacctccgagagcacagcggcc |
| | | ctgggctgcctggtcaaggactacttccccgaaccggtgacggtgtcgtggaac |
| | | tcaggcgctctgaccagcggcgtgcacaccttcccagctgtcctacagtcctca |
| | | ggactctactccctcagcagcgtggtgaccgtgccctccagcaacttcggcacc |
| | | cagacctacacctgcaacgtagatcacaagcccagcaacaccaaggtggacaa |
| | | gacagttgagcgcaaatcctgtgtcgagtgcccaccgtgcccagcaccacctgt |
| | | ggcaggaccgtcagtcttcctcttccccccaaaacccaaggacaccctcatgatc |
| | | tcccggacccctgaggtcacatgcgtggtggtggacgtgagccacgaagaccc |
| | | tgaggtcaagttcaactggtacgtggacggcgtggaggtgcataatgccaagac |
| | | aaagccgcgggaggagcagtacaacagcacgtaccgtgtggtcagcgtcctc |
| | | accgtcctgcaccaggactggctgaatggcaaggagtacaagtgcaaggtctc |
| | | caacaaagccctcccaagcagcatcgagaaaaccatctccaaagccaaaggg |
| | | cagccccgagaaccacaggtgtacaccctgcccccatcccgggaggagatga |
| | | ccaagaaccaggtcagcctgacctgcctggtcaaaggcttctatcccagcgaca |
| | | tcgccgtggagtgggagagcaatgggcagccggagaacaactacaagaccac |
| | | gcctcccgtgctggactccgacggctccttcttcctctatagcaagctcaccgtgg |
| | | acaagagcaggtggcagcaggggaacgtcttctcatgctccgtgatgcatgag |
| | | gctctgcacaaccactacacgcagaagagcctctccctgtccccgggtaaa |
| 223 | mAb-CD73.7-Vh-hHC-IgG1.1f | caggtgcagctggtggagtctgggggaggcgtggtccagcctgggaggtccct |
| | | gagactctcctgtgcaagctctggattcaccttcagtaactatggcatgcactggg |
| | | tccgccaggctccaggcaaggggctggagtgggtggcagttatattgtatgattc |
| | | cagtaataaatactatccagactccgtgaagggccgattcaccatctccagagac |
| | | aattccaagaacacgctgtatctgcaaatgaacagcctgagagccgaggacac |
| | | ggctgtgtattactgtgcgagagggggcagcagctggtaccctgattcttttgata |
| | | tctggggccaaggaacaatggtcaccgtctcttcagcgtcgaccaagggcccct |
| | | ccgtgtttcctctggccccttccagcaagtccacctctggcggaacagccgctct |
| | | gggctgcctggtcaaggactacttccccgagcctgtgaccgtgtcctggaactct |
| | | ggcgccctgacatctggcgtgcacaccttccctgctgtgctgcagtctagcggc |
| | | ctgtactccctgtcctccgtcgtgacagtgccctccagctctctgggcacccaga |
| | | cctacatctgcaacgtgaaccacaagccctccaacaccaaggtggacaagcgg |
| | | gtggaacccaagtcctgcgacaagacccatacctgccctccctgccctgctcct |
| | | gaagctgaaggcgcccctagcgtgttcctgttccctccaaagcccaaggacacc |
| | | ctgatgatctcccggacccctgaagtgacctgcgtggtggtggatgtgtcccacg |
| | | aggacccagaagtgaagttcaattggtacgtggacggcgtggaagtgcacaac |
| | | gccaagaccaagcctagagaggaacagtacaactccacctaccgggtggtgtc |
| | | cgtgctgaccgtgctgcaccaggattggctgaacggcaaagagtacaagtgca |
| | | aggtgtccaacaaggccctgcctagctccatcgaaaagaccatctccaaggcta |
| | | agggccagccccgcgagccccaggtgtacacactgcctccatcccgggaaga |
| | | gatgaccaagaaccaggtgtccctgacttgcctcgtgaagggcttctacccctcc |
| | | gatatcgccgtggaatgggagtccaacggccagcctgagaacaactacaagac |
| | | cacccctcccgtgctggactccgacggctcattcttcctgtacagcaagctgaca |
| | | gtggataagtcccggtggcagcaggggaacgtgttctcctgctccgtgatgcac |
| | | gaggctctgcacaaccactacacacagaagtccctgtctctgtcccctggc |
| 224 | mAb-CD73.7-Vh-hHC-IgG2-C219S | caggtgcagctggtggagtctgggggaggcgtggtccagcctgggaggtccct |
| | | gagactctcctgtgcaagctctggattcaccttcagtaactatggcatgcactggg |
| | | tccgccaggctccaggcaaggggctggagtgggtggcagttatattgtatgattc |
| | | cagtaataaatactatccagactccgtgaagggccgattcaccatctccagagac |
| | | aattccaagaacacgctgtatctgcaaatgaacagcctgagagccgaggacac |
| | | ggctgtgtattactgtgcgagagggggcagcagctggtaccctgattcttttgata |
| | | tctggggccaaggaacaatggtcaccgtctcttcagcgtcgaccaagggcccct |
| | | ctgtgtttcctctggccccttgctcccggtccacctctgagtctaccgctgctctgg |
| | | gctgcctggtcaaggactacttccccgagcctgtgaccgtgtcctggaactctgg |
| | | cgctctgacctccggcgtgcacacctttccagccgtgctgcagtcctccggcctg |
| | | tactctctgtcctccgtcgtgaccgtgccctcctccaacttcggcacccagaccta |
| | | cacctgtaacgtggaccacaagccctccaacaccaaggtggacaagaccgtgg |
| | | aacggaagtcctgcgtggaatgccctccttgccctgcacctcctgtggctggccc |
| | | ttccgtgttcctgttccccccaaagcccaaggacaccctgatgatctcccggacc |
| | | cccgaagtgacctgcgtggtggtggatgtgtcccacgaggaccccgaggtgca |
| | | gttcaattggtacgtggacggcgtggaagtgcacaacgccaagaccaagccca |
| | | gagaggaacagttcaactccaccttccgggtggtgtccgtgctgaccgtggtgc |
| | | accaggactggctgaacggcaaagagtacaagtgcaaggtgtccaacaaggg |
| | | cctgcctgcccccatcgaaaagaccatctccaagacaaagggccagccccgc |
| | | gagcctcaggtgtacacactgcctcccagccgggaagagatgaccaagaacc |
| | | aggtgtccctgacctgtctggtcaagggcttctacccctccgatatcgccgtgga |
| | | atgggagtccaacggccagcccgagaacaactacaagaccaccccccccatg |
| | | ctggactccgacggctcattcttcctgtactccaagctgacagtggacaagtccc |
| | | ggtggcagcagggcaacgtgttctcctgctctgtgatgcacgaggccctgcaca |
| | | accactacacccagaagtccctgtccctgagccccggcaaa |
| 225 | mAb-CD73.7-Vh-hHC-IgG2-C219S- | caggtgcagctggtggagtctgggggaggcgtggtccagcctgggaggtccct |
| | IgG1.1f | gagactctcctgtgcaagctctggattcaccttcagtaactatggcatgcactggg |
| | | tccgccaggctccaggcaaggggctggagtgggtggcagttatattgtatgattc |
| | | cagtaataaatactatccagactccgtgaagggccgattcaccatctccagagac |
| | | aattccaagaacacgctgtatctgcaaatgaacagcctgagagccgaggacac |
| | | ggctgtgtattactgtgcgagagggggcagcagctggtaccctgattcttttgata |
| | | tctggggccaaggaacaatggtcaccgtctcttcagcgtcgaccaagggcccat |
| | | cggtcttccccctggcgccctgctccaggagcacctccgagagcacagcggcc |
| | | ctgggctgcctggtcaaggactacttccccgaaccggtgacggtgtcgtggaac |
| | | tcaggcgctctgaccagcggcgtgcacaccttcccagctgtcctacagtcctca |
| | | ggactctactccctcagcagcgtggtgaccgtgccctccagcaacttcggcacc |
| | | cagacctacacctgcaacgtagatcacaagcccagcaacaccaaggtggacaa |
| | | gacagttgagcgcaaatcctgtgtcgagtgcccaccgtgcccagcaccacctgt |
| | | ggcaggaccgtcagtcttcctcttccccccaaaacccaaggacaccctcatgatc |
| | | tcccggacccctgaggtcacatgcgtggtggtggacgtgagccacgaagaccc |
| | | tgaggtcaagttcaactggtacgtggacggcgtggaggtgcataatgccaagac |
| | | aaagccgcgggaggagcagtacaacagcacgtaccgtgtggtcagcgtcctc |
| | | accgtcctgcaccaggactggctgaatggcaaggagtacaagtgcaaggtctc |
| | | caacaaagccctcccaagcagcatcgagaaaaccatctccaaagccaaaggg |
| | | cagccccgagaaccacaggtgtacaccctgcccccatcccgggaggagatga |
| | | ccaagaaccaggtcagcctgacctgcctggtcaaaggcttctatcccagcgaca |
| | | tcgccgtggagtgggagagcaatgggcagccggagaacaactacaagaccac |
| | | gcctcccgtgctggactccgacggctccttcttcctctatagcaagctcaccgtgg |
| | | acaagagcaggtggcagcaggggaacgtcttctcatgctccgtgatgcatgag |
| | | gctctgcacaaccactacacgcagaagagcctctccctgtccccgggtaaa |
| 226 | mAb-CD73.8-Vh-hHC-IgG1.1f | caggtgcagctggtggagtctgggggaggcgtggtccagcctgggaggtccct |
| | | gagactctcctgtgcagcctctggattcaccttcagtaactatggcatgcactggg |
| | | tccgccaggctccaggcaaggggctggagtgggtggcagttatatggtatgatt |
| | | ccagtaataaatactatccagactccgtgaagggccgattcaccatctccagaga |
| | | caattccaagaacacgctgtatctgcaaatgaacagcctgagagccgaggaca |
| | | cggctgtgtattactgtgcgagagggggcagcagctggtaccctgattcttttgat |
| | | atctggggccaaggaacaatggtcaccgtctcttcagcgtcgaccaagggccc |
| | | ctccgtgtttcctctggccccttccagcaagtccacctctggcggaacagccgct |
| | | ctgggctgcctggtcaaggactacttccccgagcctgtgaccgtgtcctggaact |
| | | ctggcgccctgacatctggcgtgcacaccttccctgctgtgctgcagtctagcgg |
| | | cctgtactccctgtcctccgtcgtgacagtgccctccagctctctgggcacccag |
| | | acctacatctgcaacgtgaaccacaagccctccaacaccaaggtggacaagcg |
| | | ggtggaacccaagtcctgcgacaagacccatacctgccctccctgccctgctcc |
| | | tgaagctgaaggcgcccctagcgtgttcctgttccctccaaagcccaaggacac |
| | | cctgatgatctcccggacccctgaagtgacctgcgtggtggtggatgtgtcccac |
| | | gaggacccagaagtgaagttcaattggtacgtggacggcgtggaagtgcacaa |
| | | cgccaagaccaagcctagagaggaacagtacaactccacctaccgggtggtgt |
| | | ccgtgctgaccgtgctgcaccaggattggctgaacggcaaagagtacaagtgc |
| | | aaggtgtccaacaaggccctgcctagctccatcgaaaagaccatctccaaggct |
| | | aagggccagccccgcgagccccaggtgtacacactgcctccatcccgggaag |
| | | agatgaccaagaaccaggtgtccctgacttgcctcgtgaagggcttctacccctc |
| | | cgatatcgccgtggaatgggagtccaacggccagcctgagaacaactacaaga |
| | | ccacccctcccgtgctggactccgacggctcattcttcctgtacagcaagctgac |
| | | agtggataagtcccggtggcagcaggggaacgtgttctcctgctccgtgatgca |
| | | cgaggctctgcacaaccactacacacagaagtccctgtctctgtcccctggc |
| 227 | mAb-CD73.8-Vh-hHC-IgG2-C219S | caggtgcagctggtggagtctgggggaggcgtggtccagcctgggaggtccct |
| | | gagactctcctgtgcagcctctggattcaccttcagtaactatggcatgcactggg |
| | | tccgccaggctccaggcaaggggctggagtgggtggcagttatatggtatgatt |
| | | ccagtaataaatactatccagactccgtgaagggccgattcaccatctccagaga |
| | | caattccaagaacacgctgtatctgcaaatgaacagcctgagagccgaggaca |
| | | cggctgtgtattactgtgcgagagggggcagcagctggtaccctgattcttttgat |
| | | atctggggccaaggaacaatggtcaccgtctcttcagcgtcgaccaagggccc |
| | | ctctgtgtttcctctggccccttgctcccggtccacctctgagtctaccgctgctctg |
| | | ggctgcctggtcaaggactacttccccgagcctgtgaccgtgtcctggaactctg |
| | | gcgctctgacctccggcgtgcacacctttccagccgtgctgcagtcctccggcct |
| | | gtactctctgtcctccgtcgtgaccgtgccctcctccaacttcggcacccagacct |
| | | acacctgtaacgtggaccacaagccctccaacaccaaggtggacaagaccgtg |
| | | gaacggaagtcctgcgtggaatgccctccttgccctgcacctcctgtggctggc |
| | | ccttccgtgttcctgttccccccaaagcccaaggacaccctgatgatctcccgga |
| | | cccccgaagtgacctgcgtggtggtggatgtgtcccacgaggaccccgaggtg |
| | | cagttcaattggtacgtggacggcgtggaagtgcacaacgccaagaccaagcc |
| | | cagagaggaacagttcaactccaccttccgggtggtgtccgtgctgaccgtggt |
| | | gcaccaggactggctgaacggcaaagagtacaagtgcaaggtgtccaacaag |
| | | ggcctgcctgcccccatcgaaaagaccatctccaagacaaagggccagcccc |
| | | gcgagcctcaggtgtacacactgcctcccagccgggaagagatgaccaagaa |
| | | ccaggtgtccctgacctgtctggtcaagggcttctacccctccgatatcgccgtg |
| | | gaatgggagtccaacggccagcccgagaacaactacaagaccacccccccca |
| | | tgctggactccgacggctcattcttcctgtactccaagctgacagtggacaagtcc |
| | | cggtggcagcagggcaacgtgttctcctgctctgtgatgcacgaggccctgcac |
| | | aaccactacacccagaagtccctgtccctgagccccggcaaa |
| 228 | mAb-CD73.8-Vh-hHC-IgG2-C219S- | caggtgcagctggtggagtctgggggaggcgtggtccagcctgggaggtccct |
| | IgG1.1f | gagactctcctgtgcagcctctggattcaccttcagtaactatggcatgcactggg |
| | | tccgccaggctccaggcaaggggctggagtgggtggcagttatatggtatgatt |
| | | ccagtaataaatactatccagactccgtgaagggccgattcaccatctccagaga |
| | | caattccaagaacacgctgtatctgcaaatgaacagcctgagagccgaggaca |
| | | cggctgtgtattactgtgcgagagggggcagcagctggtaccctgattcttttgat |
| | | atctggggccaaggaacaatggtcaccgtctcttcagcgtcgaccaagggccc |
| | | atcggtcttccccctggcgccctgctccaggagcacctccgagagcacagcgg |
| | | ccctgggctgcctggtcaaggactacttccccgaaccggtgacggtgtcgtgga |
| | | actcaggcgctctgaccagcggcgtgcacaccttcccagctgtcctacagtcctc |
| | | aggactctactccctcagcagcgtggtgaccgtgccctccagcaacttcggcac |
| | | ccagacctacacctgcaacgtagatcacaagcccagcaacaccaaggtggaca |
| | | agacagttgagcgcaaatcctgtgtcgagtgcccaccgtgcccagcaccacctg |
| | | tggcaggaccgtcagtcttcctcttccccccaaaacccaaggacaccctcatgat |
| | | ctcccggacccctgaggtcacatgcgtggtggtggacgtgagccacgaagacc |
| | | ctgaggtcaagttcaactggtacgtggacggcgtggaggtgcataatgccaaga |
| | | caaagccgcgggaggagcagtacaacagcacgtaccgtgtggtcagcgtcct |
| | | caccgtcctgcaccaggactggctgaatggcaaggagtacaagtgcaaggtct |
| | | ccaacaaagccctcccaagcagcatcgagaaaaccatctccaaagccaaagg |
| | | gcagccccgagaaccacaggtgtacaccctgcccccatcccgggaggagatg |
| | | accaagaaccaggtcagcctgacctgcctggtcaaaggcttctatcccagcgac |
| | | atcgccgtggagtgggagagcaatgggcagccggagaacaactacaagacca |
| | | cgcctcccgtgctggactccgacggctccttcttcctctatagcaagctcaccgtg |
| | | gacaagagcaggtggcagcaggggaacgtcttctcatgctccgtgatgcatga |
| | | ggctctgcacaaccactacacgcagaagagcctctccctgtccccgggtaaa |
| 229 | mAb-CD73.9-Vh-hHC-IgG1.1f | caggtgcagctggtggagtctgggggaggcgtggtccagcctgggaggtccct |
| | | gagactctcctgtgcaagctctggattcaccttcagtaactatggcatgcactggg |
| | | tccgccaggctccaggcaaggggctggagtgggtggcagttatatggtatgatt |
| | | ccagtaataaatactatccagactccgtgaagggccgattcaccatctccagaga |
| | | caattccaagaacacgctgtatctgcaaatgaacagcctgagagccgaggaca |
| | | cggctgtgtattactgtgcgagagggggcagcagctggtaccctgattcttttgat |
| | | atctggggccaaggaacaatggtcaccgtctcttcagcgtcgaccaagggccc |
| | | ctccgtgtttcctctggccccttccagcaagtccacctctggcggaacagccgct |
| | | ctgggctgcctggtcaaggactacttccccgagcctgtgaccgtgtcctggaact |
| | | ctggcgccctgacatctggcgtgcacaccttccctgctgtgctgcagtctagcgg |
| | | cctgtactccctgtcctccgtcgtgacagtgccctccagctctctgggcacccag |
| | | acctacatctgcaacgtgaaccacaagccctccaacaccaaggtggacaagcg |
| | | ggtggaacccaagtcctgcgacaagacccatacctgccctccctgccctgctcc |
| | | tgaagctgaaggcgcccctagcgtgttcctgttccctccaaagcccaaggacac |
| | | cctgatgatctcccggacccctgaagtgacctgcgtggtggtggatgtgtcccac |
| | | gaggacccagaagtgaagttcaattggtacgtggacggcgtggaagtgcacaa |
| | | cgccaagaccaagcctagagaggaacagtacaactccacctaccgggtggtgt |
| | | ccgtgctgaccgtgctgcaccaggattggctgaacggcaaagagtacaagtgc |
| | | aaggtgtccaacaaggccctgcctagctccatcgaaaagaccatctccaaggct |
| | | aagggccagccccgcgagccccaggtgtacacactgcctccatcccgggaag |
| | | agatgaccaagaaccaggtgtccctgacttgcctcgtgaagggcttctacccctc |
| | | cgatatcgccgtggaatgggagtccaacggccagcctgagaacaactacaaga |
| | | ccacccctcccgtgctggactccgacggctcattcttcctgtacagcaagctgac |
| | | agtggataagtcccggtggcagcaggggaacgtgttctcctgctccgtgatgca |
| | | cgaggctctgcacaaccactacacacagaagtccctgtctctgtcccctggc |
| 230 | mAb-CD73.9-Vh-hHC-IgG2-C219S | caggtgcagctggtggagtctgggggaggcgtggtccagcctgggaggtccct |
| | | gagactctcctgtgcaagctctggattcaccttcagtaactatggcatgcactggg |
| | | tccgccaggctccaggcaaggggctggagtgggtggcagttatatggtatgatt |
| | | ccagtaataaatactatccagactccgtgaagggccgattcaccatctccagaga |
| | | caattccaagaacacgctgtatctgcaaatgaacagcctgagagccgaggaca |
| | | cggctgtgtattactgtgcgagagggggcagcagctggtaccctgattcttttgat |
| | | atctggggccaaggaacaatggtcaccgtctcttcagcgtcgaccaagggccc |
| | | ctctgtgtttcctctggccccttgctcccggtccacctctgagtctaccgctgctctg |
| | | ggctgcctggtcaaggactacttccccgagcctgtgaccgtgtcctggaactctg |
| | | gcgctctgacctccggcgtgcacacctttccagccgtgctgcagtcctccggcct |
| | | gtactctctgtcctccgtcgtgaccgtgccctcctccaacttcggcacccagacct |
| | | acacctgtaacgtggaccacaagccctccaacaccaaggtggacaagaccgtg |
| | | gaacggaagtcctgcgtggaatgccctccttgccctgcacctcctgtggctggc |
| | | ccttccgtgttcctgttccccccaaagcccaaggacaccctgatgatctcccgga |
| | | cccccgaagtgacctgcgtggtggtggatgtgtcccacgaggaccccgaggtg |
| | | cagttcaattggtacgtggacggcgtggaagtgcacaacgccaagaccaagcc |
| | | cagagaggaacagttcaactccaccttccgggtggtgtccgtgctgaccgtggt |
| | | gcaccaggactggctgaacggcaaagagtacaagtgcaaggtgtccaacaag |
| | | ggcctgcctgcccccatcgaaaagaccatctccaagacaaagggccagcccc |
| | | gcgagcctcaggtgtacacactgcctcccagccgggaagagatgaccaagaa |
| | | ccaggtgtccctgacctgtctggtcaagggcttctacccctccgatatcgccgtg |
| | | gaatgggagtccaacggccagcccgagaacaactacaagaccacccccccca |
| | | tgctggactccgacggctcattcttcctgtactccaagctgacagtggacaagtcc |
| | | cggtggcagcagggcaacgtgttctcctgctctgtgatgcacgaggccctgcac |
| | | aaccactacacccagaagtccctgtccctgagccccggcaaa |
| 231 | mAb-CD73.9-Vh-hHC-IgG2-C219S- | caggtgcagctggtggagtctgggggaggcgtggtccagcctgggaggtccct |
| | IgG1.1f | gagactctcctgtgcaagctctggattcaccttcagtaactatggcatgcactggg |
| | | tccgccaggctccaggcaaggggctggagtgggtggcagttatatggtatgatt |
| | | ccagtaataaatactatccagactccgtgaagggccgattcaccatctccagaga |
| | | caattccaagaacacgctgtatctgcaaatgaacagcctgagagccgaggaca |
| | | cggctgtgtattactgtgcgagagggggcagcagctggtaccctgattcttttgat |
| | | atctggggccaaggaacaatggtcaccgtctcttcagcgtcgaccaagggccc |
| | | atcggtcttccccctggcgccctgctccaggagcacctccgagagcacagcgg |
| | | ccctgggctgcctggtcaaggactacttccccgaaccggtgacggtgtcgtgga |
| | | actcaggcgctctgaccagcggcgtgcacaccttcccagctgtcctacagtcctc |
| | | aggactctactccctcagcagcgtggtgaccgtgccctccagcaacttcggcac |
| | | ccagacctacacctgcaacgtagatcacaagcccagcaacaccaaggtggaca |
| | | agacagttgagcgcaaatcctgtgtcgagtgcccaccgtgcccagcaccacctg |
| | | tggcaggaccgtcagtcttcctcttccccccaaaacccaaggacaccctcatgat |
| | | ctcccggacccctgaggtcacatgcgtggtggtggacgtgagccacgaagacc |
| | | ctgaggtcaagttcaactggtacgtggacggcgtggaggtgcataatgccaaga |
| | | caaagccgcgggaggagcagtacaac agcacgtaccgtgtggtcagcgtcct |
| | | caccgtcctgcaccaggactggctgaatggcaaggagtacaagtgcaaggtct |
| | | ccaacaaagccctcccaagcagcatcgagaaaaccatctccaaagccaaagg |
| | | gcagccccgagaaccacaggtgtacaccctgcccccatcccgggaggagatg |
| | | accaagaaccaggtcagcctgacctgcctggtcaaaggcttctatcccagcgac |
| | | atcgccgtggagtgggagagcaatgggcagccggagaacaactacaagacca |
| | | cgcctcccgtgctggactccgacggctccttcttcctctatagcaagctcaccgtg |
| | | gacaagagcaggtggcagcaggggaacgtcttctcatgctccgtgatgcatga |
| | | ggctctgcacaaccactacacgcagaagagcctctccctgtccccgggtaaa |
| 232 | mAb-CD73.10-Vh-hHC-IgG1.1f | caggtgcagctggtggagtctgggggaggcgtggtccagcctgggaggtccct |
| | | gagactctcctgtgcagcctctggattcaccttcagtaactatggcatgcactggg |
| | | tccgccaggctccaggcaaggggctggagtgggtggcagttatatggtatgatg |
| | | agagtaataaatactatccagactccgtgaagggccgattcaccatctccagaga |
| | | caattccaagaacacgctgtatctgcaaatgaacagcctgagagccgaggaca |
| | | cggctgtgtattactgtgcgagagggggcagcagctggtaccctgattcttttgat |
| | | atctggggccaaggaacaatggtcaccgtctcttcagcgtcgaccaagggccc |
| | | ctccgtgtttcctctggccccttccagcaagtccacctctggcggaacagccgct |
| | | ctgggctgcctggtcaaggactacttccccgagcctgtgaccgtgtcctggaact |
| | | ctggcgccctgacatctggcgtgcacaccttccctgctgtgctgcagtctagcgg |
| | | cctgtactccctgtcctccgtcgtgacagtgccctccagctctctgggcacccag |
| | | acctacatctgcaacgtgaaccacaagccctccaacaccaaggtggacaagcg |
| | | ggtggaacccaagtcctgcgacaagacccatacctgccctccctgccctgctcc |
| | | tgaagctgaaggcgcccctagcgtgttcctgttccctccaaagcccaaggacac |
| | | cctgatgatctcccggacccctgaagtgacctgcgtggtggtggatgtgtcccac |
| | | gaggacccagaagtgaagttcaattggtacgtggacggcgtggaagtgcacaa |
| | | cgccaagaccaagcctagagaggaacagtacaactccacctaccgggtggtgt |
| | | ccgtgctgaccgtgctgcaccaggattggctgaacggcaaagagtacaagtgc |
| | | aaggtgtccaacaaggccctgcctagctccatcgaaaagaccatctccaaggct |
| | | aagggccagccccgcgagccccaggtgtacacactgcctccatcccgggaag |
| | | agatgaccaagaaccaggtgtccctgacttgcctcgtgaagggcttctacccctc |
| | | cgatatcgccgtggaatgggagtccaacggccagcctgagaacaactacaaga |
| | | ccacccctcccgtgctggactccgacggctcattcttcctgtacagcaagctgac |
| | | agtggataagtcccggtggcagcaggggaacgtgttctcctgctccgtgatgca |
| | | cgaggctctgcacaaccactacacacagaagtccctgtctctgtcccctggc |
| 233 | mAb-CD73.10-Vh-hHC-IgG2-C219S | caggtgcagctggtggagtctgggggaggcgtggtccagcctgggaggtccct |
| | | gagactctcctgtgcagcctctggattcaccttcagtaactatggcatgcactggg |
| | | tccgccaggctccaggcaaggggctggagtgggtggcagttatatggtatgatg |
| | | agagtaataaatactatccagactccgtgaagggccgattcaccatctccagaga |
| | | caattccaagaacacgctgtatctgcaaatgaacagcctgagagccgaggaca |
| | | cggctgtgtattactgtgcgagagggggcagcagctggtaccctgattcttttgat |
| | | atctggggccaaggaacaatggtcaccgtctcttcagcgtcgaccaagggccc |
| | | ctctgtgtttcctctggccccttgctcccggtccacctctgagtctaccgctgctctg |
| | | ggctgcctggtcaaggactacttccccgagcctgtgaccgtgtcctggaactctg |
| | | gcgctctgacctccggcgtgcacacctttccagccgtgctgcagtcctccggcct |
| | | gtactctctgtcctccgtcgtgaccgtgccctcctccaacttcggcacccagacct |
| | | acacctgtaacgtggaccacaagccctccaacaccaaggtggacaagaccgtg |
| | | gaacggaagtcctgcgtggaatgccctccttgccctgcacctcctgtggctggc |
| | | ccttccgtgttcctgttccccccaaagcccaaggacaccctgatgatctcccgga |
| | | cccccgaagtgacctgcgtggtggtggatgtgtcccacgaggaccccgaggtg |
| | | cagttcaattggtacgtggacggcgtggaagtgcacaacgccaagaccaagcc |
| | | cagagaggaacagttcaactccaccttccgggtggtgtccgtgctgaccgtggt |
| | | gcaccaggactggctgaacggcaaagagtacaagtgcaaggtgtccaacaag |
| | | ggcctgcctgcccccatcgaaaagaccatctccaagacaaagggccagcccc |
| | | gcgagcctcaggtgtacacactgcctcccagccgggaagagatgaccaagaa |
| | | ccaggtgtccctgacctgtctggtcaagggcttctacccctccgatatcgccgtg |
| | | gaatgggagtccaacggccagcccgagaacaactacaagaccacccccccca |
| | | tgctggactccgacggctcattcttcctgtactccaagctgacagtggacaagtcc |
| | | cggtggcagcagggcaacgtgttctcctgctctgtgatgcacgaggccctgcac |
| | | aaccactacacccagaagtccctgtccctgagccccggcaaa |
| 234 | mAb-CD73.10-Vh-hHC-IgG2-C219S- | caggtgcagctggtggagtctgggggaggcgtggtccagcctgggaggtccct |
| | IgG1.1f | gagactctcctgtgcagcctctggattcaccttcagtaactatggcatgcactggg |
| | | tccgccaggctccaggcaaggggctggagtgggtggcagttatatggtatgatg |
| | | agagtaataaatactatccagactccgtgaagggccgattcaccatctccagaga |
| | | caattccaagaacacgctgtatctgcaaatgaacagcctgagagccgaggaca |
| | | cggctgtgtattactgtgcgagagggggcagcagctggtaccctgattcttttgat |
| | | atctggggccaaggaacaatggtcaccgtctcttcagcgtcgaccaagggccc |
| | | atcggtcttccccctggcgccctgctccaggagcacctccgagagcacagcgg |
| | | ccctgggctgcctggtcaaggactacttccccgaaccggtgacggtgtcgtgga |
| | | actcaggcgctctgaccagcggcgtgcacaccttcccagctgtcctacagtcctc |
| | | aggactctactccctcagcagcgtggtgaccgtgccctccagcaacttcggcac |
| | | ccagacctacacctgcaacgtagatcacaagcccagcaacaccaaggtggaca |
| | | agacagttgagcgcaaatcctgtgtcgagtgcccaccgtgcccagcaccacctg |
| | | tggcaggaccgtcagtcttcctcttccccccaaaacccaaggacaccctcatgat |
| | | ctcccggacccctgaggtcacatgcgtggtggtggacgtgagccacgaagacc |
| | | ctgaggtcaagttcaactggtacgtggacggcgtggaggtgcataatgccaaga |
| | | caaagccgcgggaggagcagtacaacagcacgtaccgtgtggtcagcgtcct |
| | | caccgtcctgcaccaggactggctgaatggcaaggagtacaagtgcaaggtct |
| | | ccaacaaagccctcccaagcagcatcgagaaaaccatctccaaagccaaagg |
| | | gcagccccgagaaccacaggtgtacaccctgcccccatcccgggaggagatg |
| | | accaagaaccaggtcagcctgacctgcctggtcaaaggcttctatcccagcgac |
| | | atcgccgtggagtgggagagcaatgggcagccggagaacaactacaagacca |
| | | cgcctcccgtgctggactccgacggctccttcttcctctatagcaagctcaccgtg |
| | | gacaagagcaggtggcagcaggggaacgtcttctcatgctccgtgatgcatga |
| | | ggctctgcacaaccactacacgcagaagagcctctccctgtccccgggtaaa |
| 235 | mAb-CD73.11-Vh-hHC-IgG1.1f | caggtgcagctggtggagtctgggggaggcgtggtccagcctgggaggtccct |
| | | gagactctcctgtgcagcgtctggattcaccttcagtaactatggcatgcactggg |
| | | tccgccaggctccaggcaaggggctggagtgggtggcagttatatggtatgatg |
| | | aaagtaataaatactatgcagactccgtgaagggccgattcaccatctccagaga |
| | | caattccaagaacacgctgtttctgcaaatgaacagcctgagagccgaggacac |
| | | ggctgtgtattattgtgcgagagggtataacagcaggtggtaccctgatgcttttg |
| | | atatctggggccaagggacaatggtcaccgtctcttcagcgtcgaccaagggcc |
| | | cctccgtgtttcctctggccccttccagcaagtccacctctggcggaacagccgc |
| | | tctgggctgcctggtcaaggactacttccccgagcctgtgaccgtgtcctggaac |
| | | tctggcgccctgacatctggcgtgcacaccttccctgctgtgctgcagtctagcg |
| | | gcctgtactccctgtcctccgtcgtgacagtgccctccagctctctgggcaccca |
| | | gacctacatctgcaacgtgaaccacaagccctccaacaccaaggtggacaagc |
| | | gggtggaacccaagtcctgcgacaagacccatacctgccctccctgccctgctc |
| | | ctgaagctgaaggcgcccctagcgtgttcctgttccctccaaagcccaaggaca |
| | | ccctgatgatctcccggacccctgaagtgacctgcgtggtggtggatgtgtccca |
| | | cgaggacccagaagtgaagttcaattggtacgtggacggcgtggaagtgcaca |
| | | acgccaagaccaagcctagagaggaacagtacaactccacctaccgggtggt |
| | | gtccgtgctgaccgtgctgcaccaggattggctgaacggcaaagagtacaagt |
| | | gcaaggtgtccaacaaggccctgcctagctccatcgaaaagaccatctccaag |
| | | gctaagggccagccccgcgagccccaggtgtacacactgcctccatcccggg |
| | | aagagatgaccaagaaccaggtgtccctgacttgcctcgtgaagggcttctacc |
| | | cctccgatatcgccgtggaatgggagtccaacggccagcctgagaacaactac |
| | | aagaccacccctcccgtgctggactccgacggctcattcttcctgtacagcaagc |
| | | tgacagtggataagtcccggtggcagcaggggaacgtgttctcctgctccgtga |
| | | tgcacgaggctctgcacaaccactacacacagaagtccctgtctctgtcccctgg |
| | | c |
| 236 | mAb-CD73.11-Vh-hHC-IgG2-C219S | caggtgcagctggtggagtctgggggaggcgtggtccagcctgggaggtccct |
| | | gagactctcctgtgcagcgtctggattcaccttcagtaactatggcatgcactggg |
| | | tccgccaggctccaggcaaggggctggagtgggtggcagttatatggtatgatg |
| | | aaagtaataaatactatgcagactccgtgaagggccgattcaccatctccagaga |
| | | caattccaagaacacgctgtttctgcaaatgaacagcctgagagccgaggacac |
| | | ggctgtgtattattgtgcgagagggtataacagcaggtggtaccctgatgcttttg |
| | | atatctggggccaagggacaatggtcaccgtctcttcagcgtcgaccaagggcc |
| | | cctctgtgtttcctctggccccttgctcccggtccacctctgagtctaccgctgctct |
| | | gggctgcctggtcaaggactacttccccgagcctgtgaccgtgtcctggaactct |
| | | ggcgctctgacctccggcgtgcacacctttccagccgtgctgcagtcctccggc |
| | | ctgtactctctgtcctccgtcgtgaccgtgccctcctccaacttcggcacccagac |
| | | ctacacctgtaacgtggaccacaagccctccaacaccaaggtggacaagaccg |
| | | tggaacggaagtcctgcgtggaatgccctccttgccctgcacctcctgtggctgg |
| | | cccttccgtgttcctgttccccccaaagcccaaggacaccctgatgatctcccgg |
| | | acccccgaagtgacctgcgtggtggtggatgtgtcccacgaggaccccgaggt |
| | | gcagttcaattggtacgtggacggcgtggaagtgcacaacgccaagaccaagc |
| | | ccagagaggaacagttcaactccaccttccgggtggtgtccgtgctgaccgtgg |
| | | tgcaccaggactggctgaacggcaaagagtacaagtgcaaggtgtccaacaag |
| | | ggcctgcctgcccccatcgaaaagaccatctccaagacaaagggccagcccc |
| | | gcgagcctcaggtgtacacactgcctcccagccgggaagagatgaccaagaa |
| | | ccaggtgtccctgacctgtctggtcaagggcttctacccctccgatatcgccgtg |
| | | gaatgggagtccaacggccagcccgagaacaactacaagaccacccccccca |
| | | tgctggactccgacggctcattcttcctgtactccaagctgacagtggacaagtcc |
| | | cggtggcagcagggcaacgtgttctcctgctctgtgatgcacgaggccctgcac |
| | | aaccactacacccagaagtccctgtccctgagccccggcaaa |
| 237 | CD73.4 (VH) - Nucleotide sequence | caggtgcagctggtggagtctgggggaggcgtggtccagcctgggaggtccct |
| | | gagactctcctgtgcagcctctggattcaccttcagtaactatggcatgcactggg |
| | | tccgccaggctccaggcaaggggctggagtgggtggcagttatattgtatgatg |
| | | gaagtaataaatactatccagactccgtgaagggccgattcaccatctccagaga |
| | | caattccaagaacacgctgtatctgcaaatgaacagcctgagagccgaggaca |
| | | cggctgtgtattactgtgcgagagggggcagcagctggtaccctgattcttttgat |
| | | atctggggccaaggaacaatggtcaccgtctcttca |
| 238 | 5F8 VK3 | EIVLTQSPATLSLSPGERATLSCRASQSVSSYLAWY |
| | | QQKPGQAPRLLIYDASNRATGIPARFSGSGSGTDFT |
| | | LTISSLEPEDFAVYYCQQRSNWWTFGQGTKVEIK |
| 239 | 5F8 VK3 CDR1 | RASQSVSSYLA |
| 240 | 5F8 VK3 CDR2 | DASNRAT |
| 241 | 5F8 VK3 CDR3 | QQRSNWWT |
| 242 | 5F8 VK3 - Nucleotide sequence | GAGGTGCAGCTGGTGGAGTCCGGGGGAGGCTTA |
| | | GTTCAGCCTGGGGGGTCCCTGAGACTCTCCTGTG |
| | | CAGCCTCTGGATTCACCTTCAGTAGCTACTGGAT |
| | | GCACTGGGTCCGCCAAGCTCCAGGGAAGGGGCT |
| | | GGTGTGGGTCTCACGTATTATTAGTGATGGGAGT |
| | | AGCACAGGTTACGCGGATTCCGTGAAGGGCCGA |
| | | TTCACCATCTCCAGAGACAACGCCAAGAACACG |
| | | CTGTATCTGCAAATGAACAGTCTGAGAGCCGAG |
| | | GACACGGCTGTGTATTACTGTGCAAGAGAGTTTA |
| | | GCAGTGGCTGGTACTTTGACTACTGGGGCCAGGG |
| | | AACCCTGGTCACCGTCTCCTCA |
| 243 | 11F11 (full length heavy chain)- | CAGGTGCAGCTGGTGGAGTCTGGGGGAGGCGTG |
| | NT Seq | GTCCAGCCTGGGAGGTCCCTGAGACTCTCCTGTG |
| | | CAACGTCTGGATTCACCTTCAGTAACTATGGCAT |
| | | GCACTGGGTCCGCCAGGCTCCAGGCAAGGGGCT |
| | | GGAGTGGGTGGCAGTTATATTGTATGATGGAAGT |
| | | AATAAATACTATCCAGACTCCGTGAAGGGCCGA |
| | | TTCACCATCTCCAGAGACAATTCCAAGAACACGC |
| | | TGTATCTGCAAATGAACAGCCTGAGAGCCGAGG |
| | | ACACGGCTGTGTATTACTGTGCGAGAGGGGGCA |
| | | GCAGCTGGTACCCTGATTCTTTTGATATCTGGGG |
| | | CCAAGGAACAATGGTCACCGTCTCTTCAGCCTCC |
| | | ACCAAGGGCCCATCGGTCTTCCCCCTGGCGCCCT |
| | | GCTCCAGGAGCACCTCCGAGAGCACAGCGGCCC |
| | | TGGGCTGCCTGGTCAAGGACTACTTCCCCGAACC |
| | | GGTGACGGTGTCGTGGAACTCAGGCGCTCTGACC |
| | | AGCGGCGTGCACACCTTCCCAGCTGTCCTACAGT |
| | | CCTCAGGACTCTACTCCCTCAGCAGCGTGGTGAC |
| | | CGTGCCCTCCAGCAACTTCGGCACCCAGACCTAC |
| | | ACCTGCAACGTAGATCACAAGCCCAGCAACACC |
| | | AAGGTGGACAAGACAGTTGAGCGCAAATGTTGT |
| | | GTCGAGTGCCCACCGTGCCCAGCACCACCTGTGG |
| | | CAGGACCGTCAGTCTTCCTCTTCCCCCCAAAACC |
| | | CAAGGACACCCTCATGATCTCCCGGACCCCTGAG |
| | | GTCACGTGCGTGGTGGTGGACGTGAGCCACGAA |
| | | GACCCCGAGGTCCAGTTCAACTGGTACGTGGAC |
| | | GGCGTGGAGGTGCATAATGCCAAGACAAAGCCA |
| | | CGGGAGGAGCAGTTCAACAGCACGTTCCGTGTG |
| | | GTCAGCGTCCTCACCGTTGTGCACCAGGACTGGC |
| | | TGAACGGCAAGGAGTACAAGTGCAAGGTCTCCA |
| | | ACAAAGGCCTCCCAGCCCCCATCGAGAAAACCA |
| | | TCTCCAAAACCAAAGGGCAGCCCCGAGAACCAC |
| | | AGGTGTACACCCTGCCCCCATCCCGGGAGGAGA |
| | | TGACCAAGAACCAGGTCAGCCTGACCTGCCTGGT |
| | | CAAAGGCTTCTACCCCAGCGACATCGCCGTGGA |
| | | GTGGGAGAGCAATGGGCAGCCGGAGAACAACTA |
| | | CAAGACCACACCTCCCATGCTGGACTCCGACGGC |
| | | TCCTTCTTCCTCTACAGCAAGCTCACCGTGGACA |
| | | AGAGCAGGTGGCAGCAGGGGAACGTCTTCTCAT |
| | | GCTCCGTGATGCATGAGGCTCTGCACAACCACTA |
| | | CACGCAGAAGAGCCTCTCCCTGTCTCCGGGTAAA |
| 244 | 11F11 (full length light chain 1) - | GAAATTGTGTTGACACAGTCTCCAGCCACCCTGT |
| | NT Seq | CTTTGTCTCCAGGGGAAAGAGCCACCCTCTCCTG |
| | | CAGGGCCAGTCAGGGTGTTAGCAGCTACTTAGCC |
| | | TGGTACCAGCAGAAACCTGGCCAGGCTCCCAGG |
| | | CTCCTCATCTATGATGCATCCAACAGGGCCACTG |
| | | GCATCCCAGCCAGGTTCAGTGGCAGTGGGCCTG |
| | | GGACAGACTTCACTCTCACCATCAGCAGCCTAGA |
| | | GCCTGAAGATTTTGCAGTTTATTACTGTCAGCAG |
| | | CGTAGCAACTGGCATCTCACTTTCGGCGGAGGGA |
| | | CCAAGGTGGAGATCAAACGAACTGTGGCTGCAC |
| | | CATCTGTCTTCATCTTCCCGCCATCTGATGAGCA |
| | | GTTGAAATCTGGAACTGCCTCTGTTGTGTGCCTG |
| | | CTGAATAACTTCTATCCCAGAGAGGCCAAAGTAC |
| | | AGTGGAAGGTGGATAACGCCCTCCAATCGGGTA |
| | | ACTCCCAGGAGAGTGTCACAGAGCAGGACAGCA |
| | | AGGACAGCACCTACAGCCTCAGCAGCACCCTGA |
| | | CGCTGAGCAAAGCAGACTACGAGAAACACAAAG |
| | | TCTACGCCTGCGAAGTCACCCATCAGGGCCTGAG |
| | | CTCGCCCGTCACAAAGAGCTTCAACAGGGGAGA |
| | | GTGT |
| 245 | 11F11 (full length light chain 2) - | GACATCCAGATGACCCAGTCTCCATCCTCACTGT |
| | NT Seq | CTGCATCTGTAGGAGACAGAGTCACCATCACTTG |
| | | TCGGGCGAGTCAGGGTATTAGCAGCTGGTTAGCC |
| | | TGGTATCAGCAGAAACCAGAGAAAGCCCCTAAG |
| | | TCCCTGATCTATGCTGCATCCAGTTTGCAAAGTG |
| | | GGGTCCCATCAAGGTTCAGCGGCAGTGGATCTG |
| | | GGACAGATTTCACTCTCACCATCAGCAGCCTGCA |
| | | GCCTGAAGATTTTGCAACTTATTACTGCCAACAG |
| | | TATAATAGTTACCCTCTCACTTTCGGCGGAGGGA |
| | | CCAAGGTGGAGATCAAACGAACTGTGGCTGCAC |
| | | CATCTGTCTTCATCTTCCCGCCATCTGATGAGCA |
| | | GTTGAAATCTGGAACTGCCTCTGTTGTGTGCCTG |
| | | CTGAATAACTTCTATCCCAGAGAGGCCAAAGTAC |
| | | AGTGGAAGGTGGATAACGCCCTCCAATCGGGTA |
| | | ACTCCCAGGAGAGTGTCACAGAGCAGGACAGCA |
| | | AGGACAGCACCTACAGCCTCAGCAGCACCCTGA |
| | | CGCTGAGCAAAGCAGACTACGAGAAACACAAAG |
| | | TCTACGCCTGCGAAGTCACCCATCAGGGCCTGAG |
| | | CTCGCCCGTCACAAAGAGCTTCAACAGGGGAGA |
| | | GTGT |
| 246 | 4C3 (full length heavy chain) - NT Seq | GAAGTGCAGCTGGTGGAGTCTGGGGGAGGCTTG |
| | | GTACAGCCTGGCAGGTCCCTGAGACTCTCCTGTG |
| | | CAGCCTCTGGATTCACCTTTGATGATTATGCCAT |
| | | GCACTGGGTCCGGCAAGCTCCAGGGAAGGGCCT |
| | | GGAGTGGGTCTCAGGTATTAGTTGGAAGAGTGG |
| | | TAGCATAGGCTATGCGGACTCTGTGAAGGGCCG |
| | | ATTCACCATCTCCAGAGACAACGCCAAGAACTCC |
| | | CTGTATCTGCAAATGAACAGTCTGAGAGCTGAG |
| | | GACACGGCCTTGTATTACTGTGTAAAAGGGTATT |
| | | ACGTTATTTTGACTGGCCTTGACTACTGGGGCCA |
| | | GGGAACCCTGGTCACCGTCTCCTCAGCCTCCACCAA |
| | | GGGCCCATCGGTCTTCCCCCTGGCACCCTCCTCCAAGAGCACC |
| | | TCTGGGGGCACAGCGGCCCTGGGCTGCCTGGTCAAGGACTAC |
| | | TTCCCCGAACCGGTGACGGTGTCGTGGAACTCAGGCGCCCTG |
| | | ACCAGCGGCGTGCACACCTTCCCGGCTGTCCTACAGTCCTCA |
| | | GGACTCTACTCCCTCAGCAGCGTGGTGACCGTGCCCTCCAGC |
| | | AGCTTGGGCACCCAGACCTACATCTGCAACGTGAATCACAAG |
| | | CCCAGCAACACCAAGGTGGACAAGAAAGTTGAGCCCAAATCT |
| | | TGTGACAAAACTCACACATGCCCACCGTGCCCAGCACCTGAA |
| | | CTCCTGGGGGGACCGTCAGTCTTCCTCTTCCCCCCAAAACCCA |
| | | AGGACACCCTCATGATCTCCCGGACCCCTGAGGTCACATGCG |
| | | TGGTGGTGGACGTGAGCCACGAAGACCCTGAGGTCAAGTTCA |
| | | ACTGGTACGTGGACGGCGTGGAGGTGCATAATGCCAAGACAA |
| | | AGCCGCGGGAGGAGCAGTACAACAGCACGTACCGTGTGGTC |
| | | AGCGTCCTCACCGTCCTGCACCAGGACTGGCTGAATGGCAAG |
| | | GAGTACAAGTGCAAGGTCTCCAACAAAGCCCTCCCAGCCCCC |
| | | ATCGAGAAAACCATCTCCAAAGCCAAAGGGCAGCCCCGAGA |
| | | ACCACAGGTGTACACCCTGCCCCCATCCCGGGATGAGCTGAC |
| | | CAAGAACCAGGTCAGCCTGACCTGCCTGGTCAAAGGCTTCTA |
| | | TCCCAGCGACATCGCCGTGGAGTGGGAGAGCAATGGGCAGCC |
| | | GGAGAACAACTACAAGACCACGCCTCCCGTGCTGGACTCCGA |
| | | CGGCTCCTTCTTCCTCTACAGCAAGCTCACCGTGGACAAGAG |
| | | CAGGTGGCAGCAGGGGAACGTCTTCTCATGCTCCGTGATGCA |
| | | TGAGGCTCTGCACAACCACTACACGCAGAAGAGCCTCTCCCT |
| | | GTCTCCGGGTAAA |
| 247 | 4C3 (full length light chain 1) - | GAAATTGTGTTGACGCAGTCTCCAGGCACCCTGT |
| | NT Seq | CTTTGTCTCCAGGGGAAAGAGCCACCCTCTCCTG |
| | | CAGGGCCAGTCAGAGTGTTAGCAGCTACTTAGCC |
| | | TGGTACCAGCAGAAACCTGGCCAGGCTCCCAGG |
| | | CTCCTCATCTATGGTGCATCCAGCAGGGCCACTG |
| | | GCATCCCAGACAGGTTCAGTGGCAGTGGGTCTG |
| | | GGACAGACTTCACTCTCACCATCAGCAGACTGGA |
| | | GCCTGAAGATTTTGCAGTGTATTACTGTCAGCAG |
| | | TATGGTAGCTCACCGCTCACTTTCGGCGGAGGGA |
| | | CCAAGGTGGAGATCAAACGAACTGTGGCTGCAC |
| | | CATCTGTCTTCATCTTCCCGCCATCTGATGAGCA |
| | | GTTGAAATCTGGAACTGCCTCTGTTGTGTGCCTG |
| | | CTGAATAACTTCTATCCCAGAGAGGCCAAAGTAC |
| | | AGTGGAAGGTGGATAACGCCCTCCAATCGGGTA |
| | | ACTCCCAGGAGAGTGTCACAGAGCAGGACAGCA |
| | | AGGACAGCACCTACAGCCTCAGCAGCACCCTGA |
| | | CGCTGAGCAAAGCAGACTACGAGAAACACAAAG |
| | | TCTACGCCTGCGAAGTCACCCATCAGGGCCTGAG |
| | | CTCGCCCGTCACAAAGAGCTTCAACAGGGGAGA |
| | | GTGT |
| 248 | 4C3 (full length light chain 2) - NT Seq | GACATCCAGATGACCCAGTCTCCATCCTCACTGT |
| | | CTGCATCTGTAGGAGACAGAGTCACCTTCACTTG |
| | | TCGGGCGAGTCAGGGTATTAGCAGCTGGTTAGCC |
| | | TGGTATCAGCAGAAACCAGAGAAAGCCCCTAAG |
| | | TCCCTGATCTATGCTGCATCCAGTTTGCAAAGTG |
| | | GGGTCCCATCAAGGTTCAGCGGCAGTGGATCTG |
| | | GGACAGATTTCACTCTCACCATCAGCAGCCTGCA |
| | | GCCTGAAGATTTTGCAACTTATTACTGCCAACAG |
| | | TATAATAGTTACCCTCCAACGTTCGGCCAGGGGA |
| | | CCAAGGTGGAAATCAAACGAACTGTGGCTGCAC |
| | | CATCTGTCTTCATCTTCCCGCCATCTGATGAGCA |
| | | GTTGAAATCTGGAACTGCCTCTGTTGTGTGCCTG |
| | | CTGAATAACTTCTATCCCAGAGAGGCCAAAGTAC |
| | | AGTGGAAGGTGGATAACGCCCTCCAATCGGGTA |
| | | ACTCCCAGGAGAGTGTCACAGAGCAGGACAGCA |
| | | AGGACAGCACCTACAGCCTCAGCAGCACCCTGA |
| | | CGCTGAGCAAAGCAGACTACGAGAAACACAAAG |
| | | TCTACGCCTGCGAAGTCACCCATCAGGGCCTGAG |
| | | CTCGCCCGTCACAAAGAGCTTCAACAGGGGAGA |
| | | GTGT |
| 249 | 4C3 (full length light chain 3) - NT Seq | GACATCCAGATGACCCAGTCTCCATCCTCACTGT |
| | | CTGCATCTGTAGGAGACAGAGTCACCTTCACTTG |
| | | TCGGGCGAGTCAGGGTATTAGCAGCTGGTTAGCC |
| | | TGGTATCAGCAGAAACCAGAGAAAGCCCCTAAG |
| | | TCCCTGATCTATGCTGCATCCAGTTTGCAAAGTG |
| | | GGGTCCCATCAAGGTTCAGCGGCAGTGGATCTG |
| | | GGACAGATTTCACTCTCACCATCAGCAGCCTGCA |
| | | GCCTGAAGATTTTGCAACTTATTACTGCCAACAG |
| | | TATAATAGTTACCCTCCAACGTTCGGCCAAGGGA |
| | | CCAAGGTGGAAATCAAACGAACTGTGGCTGCAC |
| | | CATCTGTCTTCATCTTCCCGCCATCTGATGAGCA |
| | | GTTGAAATCTGGAACTGCCTCTGTTGTGTGCCTG |
| | | CTGAATAACTTCTATCCCAGAGAGGCCAAAGTAC |
| | | AGTGGAAGGTGGATAACGCCCTCCAATCGGGTA |
| | | ACTCCCAGGAGAGTGTCACAGAGCAGGACAGCA |
| | | AGGACAGCACCTACAGCCTCAGCAGCACCCTGA |
| | | CGCTGAGCAAAGCAGACTACGAGAAACACAAAG |
| | | TCTACGCCTGCGAAGTCACCCATCAGGGCCTGAG |
| | | CTCGCCCGTCACAAAGAGCTTCAACAGGGGAGA |
| | | GTGT |
| 250 | 4D4 (full length heavy chain) - NT Seq | CAGGTGCAGCTGGTGGAGTCTGGGGGAGGCGTG |
| | | GTCCAGCCTGGGAGGTCCCTGAGACTCTCCTGTG |
| | | CAGCGTCTGGATTCACCTTCAGTAACTATGGCAT |
| | | GCACTGGGTCCGCCAGGCTCCAGGCAAGGGGCT |
| | | GGAGTGGGTGGCAGTTATATGGTATGATGAAAG |
| | | TAATAAATACTATGCAGACTCCGTGAAGGGCCG |
| | | ATTCACCATCTCCAGAGACAATTCCAAGAACACG |
| | | CTGTTTCTGCAAATGAACAGCCTGAGAGCCGAG |
| | | GACACGGCTGTGTATTATTGTGCGAGAGGGTATA |
| | | ACAGCAGGTGGTACCCTGATGCTTTTGATATCTG |
| | | GGGCCAAGGGACAATGGTCACCGTCTCTTCAGCC |
| | | TCCACCAAGGGCCCATCGGTCTTCCCCCTGGCGC |
| | | CCTGCTCCAGGAGCACCTCCGAGAGCACAGCGG |
| | | CCCTGGGCTGCCTGGTCAAGGACTACTTCCCCGA |
| | | ACCGGTGACGGTGTCGTGGAACTCAGGCGCTCTG |
| | | ACCAGCGGCGTGCACACCTTCCCAGCTGTCCTAC |
| | | AGTCCTCAGGACTCTACTCCCTCAGCAGCGTGGT |
| | | GACCGTGCCCTCCAGCAACTTCGGCACCCAGACC |
| | | TACACCTGCAACGTAGATCACAAGCCCAGCAAC |
| | | ACCAAGGTGGACAAGACAGTTGAGCGCAAATGT |
| | | TGTGTCGAGTGCCCACCGTGCCCAGCACCACCTG |
| | | TGGCAGGACCGTCAGTCTTCCTCTTCCCCCCAAA |
| | | ACCCAAGGACACCCTCATGATCTCCCGGACCCCT |
| | | GAGGTCACGTGCGTGGTGGTGGACGTGAGCCAC |
| | | GAAGACCCCGAGGTCCAGTTCAACTGGTACGTG |
| | | GACGGCGTGGAGGTGCATAATGCCAAGACAAAG |
| | | CCACGGGAGGAGCAGTTCAACAGCACGTTCCGT |
| | | GTGGTCAGCGTCCTCACCGTTGTGCACCAGGACT |
| | | GGCTGAACGGCAAGGAGTACAAGTGCAAGGTCT |
| | | CCAACAAAGGCCTCCCAGCCCCCATCGAGAAAA |
| | | CCATCTCCAAAACCAAAGGGCAGCCCCGAGAAC |
| | | CACAGGTGTACACCCTGCCCCCATCCCGGGAGG |
| | | AGATGACCAAGAACCAGGTCAGCCTGACCTGCC |
| | | TGGTCAAAGGCTTCTACCCCAGCGACATCGCCGT |
| | | GGAGTGGGAGAGCAATGGGCAGCCGGAGAACA |
| | | ACTACAAGACCACACCTCCCATGCTGGACTCCGA |
| | | CGGCTCCTTCTTCCTCTACAGCAAGCTCACCGTG |
| | | GACAAGAGCAGGTGGCAGCAGGGGAACGTCTTC |
| | | TCATGCTCCGTGATGCATGAGGCTCTGCACAACC |
| | | ACTACACGCAGAAGAGCCTCTCCCTGTCTCCGGG |
| | | TAAA |
| 251 | 4D4 (full length light chain 1) - NT Seq | GACATCCAGATGACCCAGTCTCCATCCTCACTGT |
| | | CTGCATCTGTAGGAGACAGAGTCACCATCACTTG |
| | | TCGGGCGAGTCAGGGTATTAGCAGCTGGTTAGCC |
| | | TGGTATCAGCAGAAACCAGAGAAAGCCCCTAAG |
| | | TCCCTGATCTATGCTGCATCCAGTTTGCAAAGTG |
| | | GGGTCCCATCAAGGTTCAGCGGCAGTGGATCTG |
| | | GGACAGATTTCACTCTCACCATCAGCAGCCTGCA |
| | | GCCTGAAGATTTTGCAACTTATTACTGCCAACAG |
| | | TATAATAGTTACCCGCTCACTTTCGGCGGAGGGA |
| | | CCAAGGTGGAGATCAAACGAACTGTGGCTGCAC |
| | | CATCTGTCTTCATCTTCCCGCCATCTGATGAGCA |
| | | GTTGAAATCTGGAACTGCCTCTGTTGTGTGCCTG |
| | | CTGAATAACTTCTATCCCAGAGAGGCCAAAGTAC |
| | | AGTGGAAGGTGGATAACGCCCTCCAATCGGGTA |
| | | ACTCCCAGGAGAGTGTCACAGAGCAGGACAGCA |
| | | AGGACAGCACCTACAGCCTCAGCAGCACCCTGA |
| | | CGCTGAGCAAAGCAGACTACGAGAAACACAAAG |
| | | TCTACGCCTGCGAAGTCACCCATCAGGGCCTGAG |
| | | CTCGCCCGTCACAAAGAGCTTCAACAGGGGAGA |
| | | GTGT |
| 252 | 10D2 (full length heavy chain) - NT Seq | CAGGTGCAGCTGGTGGAGTCTGGGGGAGGCGTG |
| | | GTCCAGCCTGGGAGGTCCCTGAGACTCTCCTGTG |
| | | CAGCGTCTGGATTCACCTTCAGTAACTATGGCCT |
| | | GCACTGGGTCCGCCAGGCTCCAGGCAAGGGGCT |
| | | GGAGTGGGTGGCAGTTATACGGTATGATGGAAG |
| | | TAATAAATACTATGCAGACTCCGTGAAGGGCCG |
| | | ATTCACCATCTCCAGAGACAATTCCAAGAACACG |
| | | CTGTATCTGCAAATGAGCAGCCTGAGAGCCGAG |
| | | GACACGGCTGTGTATTACTGTGCGAGGGGGGGC |
| | | AGCAGCTGGTACCCGGACGGTTTGGACGTCTGG |
| | | GGCCAAGGGACCACGGTCACCGTCTCCTCAGCTT |
| | | CCACCAAGGGCCCATCCGTCTTCCCCCTGGCGCC |
| | | CTGCTCCAGGAGCACCTCCGAGAGCACAGCCGC |
| | | CCTGGGCTGCCTGGTCAAGGACTACTTCCCCGAA |
| | | CCGGTGACGGTGTCGTGGAACTCAGGCGCCCTG |
| | | ACCAGCGGCGTGCACACCTTCCCGGCTGTCCTAC |
| | | AGTCCTCAGGACTCTACTCCCTCAGCAGCGTGGT |
| | | GACCGTGCCCTCCAGCAGCTTGGGCACGAAGAC |
| | | CTACACCTGCAACGTAGATCACAAGCCCAGCAA |
| | | CACCAAGGTGGACAAGAGAGTTGAGTCCAAATA |
| | | TGGTCCCCCATGCCCATCATGCCCAGCACCTGAG |
| | | TTCCTGGGGGGACCATCAGTCTTCCTGTTCCCCC |
| | | CAAAACCCAAGGACACTCTCATGATCTCCCGGAC |
| | | CCCTGAGGTCACGTGCGTGGTGGTGGACGTGAG |
| | | CCAGGAAGACCCCGAGGTCCAGTTCAACTGGTA |
| | | CGTGGATGGCGTGGAGGTGCATAATGCCAAGAC |
| | | AAAGCCGCGGGAGGAGCAGTTCAACAGCACGTA |
| | | CCGTGTGGTCAGCGTCCTCACCGTCCTGCACCAG |
| | | GACTGGCTGAACGGCAAGGAGTACAAGTGCAAG |
| | | GTCTCCAACAAAGGCCTCCCGTCCTCCATCGAGA |
| | | AAACCATCTCCAAAGCCAAAGGGCAGCCCCGAG |
| | | AGCCACAGGTGTACACCCTGCCCCCATCCCAGGA |
| | | GGAGATGACCAAGAACCAGGTCAGCCTGACCTG |
| | | CCTGGTCAAAGGCTTCTACCCCAGCGACATCGCC |
| | | GTGGAGTGGGAGAGCAATGGGCAGCCGGAGAAC |
| | | AACTACAAGACCACGCCTCCCGTGCTGGACTCCG |
| | | ACGGCTCCTTCTTCCTCTACAGCAGGCTAACCGT |
| | | GGACAAGAGCAGGTGGCAGGAGGGGAATGTCTT |
| | | CTCATGCTCCGTGATGCATGAGGCTCTGCACAAC |
| | | CACTACACACAGAAGAGCCTCTCCCTGTCTCTGG |
| | | GTAAA |
| 253 | 10D2 (full length light chain 1) - NT Seq | GCCATCCAGTTGACCCAGTCTCCATCCTCCCTGT |
| | | CTGCATCTGTAGGAGACAGAGTCACCATCACTTG |
| | | CCGGGCAAGTCAGGGCATTAGCAGTGCTTTAGCC |
| | | TGGTATCAGCAGAAACCAGGGAAAGCTCCTAAG |
| | | CTCCTGATCTATGATGCCTCCAGTTTGGAAAGTG |
| | | GGGTCCCATCAAGGTTCAGCGGCAGTGGATCTG |
| | | GGACAGATTTCACTCTCACCATCAGCAGCCTGCA |
| | | GCCTGAAGATTTTGCAACTTATTACTGTCAACAG |
| | | TTTAATAGTTACCCCACTTTCGGCGGAGGGACCA |
| | | AGGTGGAGATCAAACGAACTGTGGCTGCACCAT |
| | | CTGTCTTCATCTTCCCGCCATCTGATGAGCAGTT |
| | | GAAATCTGGAACTGCCTCTGTTGTGTGCCTGCTG |
| | | AATAACTTCTATCCCAGAGAGGCCAAAGTACAG |
| | | TGGAAGGTGGATAACGCCCTCCAATCGGGTAAC |
| | | TCCCAGGAGAGTGTCACAGAGCAGGACAGCAAG |
| | | GACAGCACCTACAGCCTCAGCAGCACCCTGACG |
| | | CTGAGCAAAGCAGACTACGAGAAACACAAAGTC |
| | | TACGCCTGCGAAGTCACCCATCAGGGCCTGAGCT |
| | | CGCCCGTCACAAAGAGCTTCAACAGGGGAGAGT |
| | | GT |
| 254 | 10D2 (full length light chain 2) - | GACATCCAGATGACCCAGTCTCCATCCTCACTGT |
| | NT Seq | CTGCATCTGTAGGAGACAGAGTCACCATCACTTG |
| | | TCGGGCGAGTCAGGGTATTAGCAGCTGGTTAGCC |
| | | TGGTATCAGCAGAAACCAGAGAAAGCCCCTAAG |
| | | TCCCTGATCTATGCTGCATCCAGTTTGCAAAGTG |
| | | GGGTCCCATCAAGGTTCAGCGGCAGTGGATCTG |
| | | GGACAGATTTCACTCTCACCATCAGCAGCCTGCA |
| | | GCCTGAAGATTTTGCAACTTATTACTGCCAACAG |
| | | TATAATAGTTACCCGCTCACTTTCGGCGGAGGGA |
| | | CCAAGGTGGAGATCAAACGAACTGTGGCTGCAC |
| | | CATCTGTCTTCATCTTCCCGCCATCTGATGAGCA |
| | | GTTGAAATCTGGAACTGCCTCTGTTGTGTGCCTG |
| | | CTGAATAACTTCTATCCCAGAGAGGCCAAAGTAC |
| | | AGTGGAAGGTGGATAACGCCCTCCAATCGGGTA |
| | | ACTCCCAGGAGAGTGTCACAGAGCAGGACAGCA |
| | | AGGACAGCACCTACAGCCTCAGCAGCACCCTGA |
| | | CGCTGAGCAAAGCAGACTACGAGAAACACAAAG |
| | | TCTACGCCTGCGAAGTCACCCATCAGGGCCTGAG |
| | | CTCGCCCGTCACAAAGAGCTTCAACAGGGGAGA |
| | | GTGT |
| 255 | 11A6 (full length heavy chain) - NT Seq | GAAGTGCAGCTGGTGGAATCTGGGGGAAACTTG |
| | | GTACAGCCTGGCAGGTCCCTGAGACTCTCCTGTG |
| | | CAGCCTCTGGATTCACCTTTGATGATTATGCCAT |
| | | GCACTGGGTCCGGCAAGCTCCAGGGAAGGGCCT |
| | | GGAGTGGGTCTCAGGTATTAGTTGGAATAATAAT |
| | | GACATAGGCTATGCGGACTCTGTGAAGGGCCGA |
| | | TTCATCATCTCCAGAGACAACGCCAAGAACTCCC |
| | | TGTATCTGCAAATGAACAGTCTGAGACCTGAGG |
| | | ACACGGCCTTGTATTATTGTGTAAAAGGTTATTA |
| | | CGTTATTTTGACTGGTCTTGACTACTGGGGCCAG |
| | | GGAACCCCGGTCACCGTCTCCTCAGCCTCCACCAAG |
| | | GGCCCATCGGTCTTCCCCCTGGCACCCTCCTCCAAGAGCACCT |
| | | CTGGGGGCACAGCGGCCCTGGGCTGCCTGGTCAAGGACTACT |
| | | TCCCCGAACCGGTGACGGTGTCGTGGAACTCAGGCGCCCTGA |
| | | CCAGCGGCGTGCACACCTTCCCGGCTGTCCTACAGTCCTCAG |
| | | GACTCTACTCCCTCAGCAGCGTGGTGACCGTGCCCTCCAGCA |
| | | GCTTGGGCACCCAGACCTACATCTGCAACGTGAATCACAAGC |
| | | CCAGCAACACCAAGGTGGACAAGAAAGTTGAGCCCAAATCTT |
| | | GTGACAAAACTCACACATGCCCACCGTGCCCAGCACCTGAAC |
| | | TCCTGGGGGGACCGTCAGTCTTCCTCTTCCCCCCAAAACCCAA |
| | | GGACACCCTCATGATCTCCCGGACCCCTGAGGTCACATGCGT |
| | | GGTGGTGGACGTGAGCCACGAAGACCCTGAGGTCAAGTTCAA |
| | | CTGGTACGTGGACGGCGTGGAGGTGCATAATGCCAAGACAAA |
| | | GCCGCGGGAGGAGCAGTACAACAGCACGTACCGTGTGGTCA |
| | | GCGTCCTCACCGTCCTGCACCAGGACTGGCTGAATGGCAAGG |
| | | AGTACAAGTGCAAGGTCTCCAACAAAGCCCTCCCAGCCCCCA |
| | | TCGAGAAAACCATCTCCAAAGCCAAAGGGCAGCCCCGAGAA |
| | | CCACAGGTGTACACCCTGCCCCCATCCCGGGATGAGCTGACC |
| | | AAGAACCAGGTCAGCCTGACCTGCCTGGTCAAAGGCTTCTAT |
| | | CCCAGCGACATCGCCGTGGAGTGGGAGAGCAATGGGCAGCC |
| | | GGAGAACAACTACAAGACCACGCCTCCCGTGCTGGACTCCGA |
| | | CGGCTCCTTCTTCCTCTACAGCAAGCTCACCGTGGACAAGAG |
| | | CAGGTGGCAGCAGGGGAACGTCTTCTCATGCTCCGTGATGCA |
| | | TGAGGCTCTGCACAACCACTACACGCAGAAGAGCCTCTCCCT |
| | | GTCTCCGGGTAAA |
| 256 | 11A6 (full length light chain 1) - | GACATCCAGATGACCCAGTCTCCATCCTCACTGT |
| | | CTGCATCTGTAGGAGACAGAGTCACCATCACTTG |
| | NT Seq | TCGGGCGAGTCAGGGTATTAGCAGCTGGTTAGCC |
| | | TGGTATCAGCAGAAACCAGAGAAAGCCCCTAAG |
| | | TCCCTGATCTATGCTGCATCCAGTTTGCAAAGTG |
| | | GGGTCCCATCAAGGTTCAGCGGCAGTGGATCTG |
| | | GGACAGATTTCACTCTCACCATCAGCAGCCTGCA |
| | | GCCTGAAGATTTTGCAACTTATTACTGCCAACAG |
| | | TATAATAGTTACCCGCTCACTTTCGGCGGAGGGA |
| | | CCAAGGTGGAGATCAAACGAACTGTGGCTGCAC |
| | | CATCTGTCTTCATCTTCCCGCCATCTGATGAGCA |
| | | GTTGAAATCTGGAACTGCCTCTGTTGTGTGCCTG |
| | | CTGAATAACTTCTATCCCAGAGAGGCCAAAGTAC |
| | | AGTGGAAGGTGGATAACGCCCTCCAATCGGGTA |
| | | ACTCCCAGGAGAGTGTCACAGAGCAGGACAGCA |
| | | AGGACAGCACCTACAGCCTCAGCAGCACCCTGA |
| | | CGCTGAGCAAAGCAGACTACGAGAAACACAAAG |
| | | TCTACGCCTGCGAAGTCACCCATCAGGGCCTGAG |
| | | CTCGCCCGTCACAAAGAGCTTCAACAGGGGAGA |
| | | GTGT |
| 257 | 24H2 (full length heavy chain) - NT Seq | CAGGTGCAACTGGTGGAGTCTGGGGGAGGCGTG |
| | | GTCCAGCCTGGGAGGTCCCTGAGACTCTCCTGTG |
| | | CAGCGTCTGGATTCACCTTCAGTAACTATGGCAT |
| | | GCACTGGGTCCGCCAGGCTCCAGGCAAGGGGCT |
| | | GGAGTGGGTGGCAGTTATATGGTATGATGGAGG |
| | | TAATAAATACTATGCAGACTCCGTGAAGGGCCG |
| | | ATTCACCATCTCCAGAGACAATTCCAAGAACACG |
| | | CTGTTTCTGCAAATGAACAGCCTGAGAGCCGAA |
| | | GACACGGCTGTGTATTACTGTGCGAGAGGGGGC |
| | | AGCAGCTGGTACCCTGATGCTTTTGATATCTGGG |
| | | GCCAAGGGACAATGGTCACCGTCTCTTCAGCTTC |
| | | CACCAAGGGCCCATCCGTCTTCCCCCTGGCGCCC |
| | | TGCTCCAGGAGCACCTCCGAGAGCACAGCCGCC |
| | | CTGGGCTGCCTGGTCAAGGACTACTTCCCCGAAC |
| | | CGGTGACGGTGTCGTGGAACTCAGGCGCCCTGA |
| | | CCAGCGGCGTGCACACCTTCCCGGCTGTCCTACA |
| | | GTCCTCAGGACTCTACTCCCTCAGCAGCGTGGTG |
| | | ACCGTGCCCTCCAGCAGCTTGGGCACGAAGACCT |
| | | ACACCTGCAACGTAGATCACAAGCCCAGCAACA |
| | | CCAAGGTGGACAAGAGAGTTGAGTCCAAATATG |
| | | GTCCCCCATGCCCATCATGCCCAGCACCTGAGTT |
| | | CCTGGGGGGACCATCAGTCTTCCTGTTCCCCCCA |
| | | AAACCCAAGGACACTCTCATGATCTCCCGGACCC |
| | | CTGAGGTCACGTGCGTGGTGGTGGACGTGAGCC |
| | | AGGAAGACCCCGAGGTCCAGTTCAACTGGTACG |
| | | TGGATGGCGTGGAGGTGCATAATGCCAAGACAA |
| | | AGCCGCGGGAGGAGCAGTTCAACAGCACGTACC |
| | | GTGTGGTCAGCGTCCTCACCGTCCTGCACCAGGA |
| | | CTGGCTGAACGGCAAGGAGTACAAGTGCAAGGT |
| | | CTCCAACAAAGGCCTCCCGTCCTCCATCGAGAAA |
| | | ACCATCTCCAAAGCCAAAGGGCAGCCCCGAGAG |
| | | CCACAGGTGTACACCCTGCCCCCATCCCAGGAGG |
| | | AGATGACCAAGAACCAGGTCAGCCTGACCTGCC |
| | | TGGTCAAAGGCTTCTACCCCAGCGACATCGCCGT |
| | | GGAGTGGGAGAGCAATGGGCAGCCGGAGAACA |
| | | ACTACAAGACCACGCCTCCCGTGCTGGACTCCGA |
| | | CGGCTCCTTCTTCCTCTACAGCAGGCTAACCGTG |
| | | GACAAGAGCAGGTGGCAGGAGGGGAATGTCTTC |
| | | TCATGCTCCGTGATGCATGAGGCTCTGCACAACC |
| | | ACTACACACAGAAGAGCCTCTCCCTGTCTCTGGG |
| | | TAAA |
| 258 | 24H2 (full length light chain 1) - | GACATCCAGATGACCCAGTCTCCATCCTCACTGT |
| | NT Seq | CTGCATCTGTAGGAGACAGAGTCACCATCACTTG |
| | | TCGGGCGAGTCAGGGTATTAGCAGCTGGTTAGCC |
| | | TGGTATCAGCAGAAACCAGAGAAAGCCCCTAAG |
| | | TCCCTGATCTATGCTGCATCCAGTTTGCAAAGTG |
| | | GGGTCCCATCAAGGTTCAGCGGCAGTGGATCTG |
| | | GGACAGATTTCACTCTCACCATCAGCAGCCTGCA |
| | | GCCTGAAGATTTTGCAACTTATTACTGCCAACAG |
| | | TATAATAGTTACCCTCTCACTTTCGGCGGAGGGA |
| | | CCAAGGTGGAGATCAAACGAACTGTGGCTGCAC |
| | | CATCTGTCTTCATCTTCCCGCCATCTGATGAGCA |
| | | GTTGAAATCTGGAACTGCCTCTGTTGTGTGCCTG |
| | | CTGAATAACTTCTATCCCAGAGAGGCCAAAGTAC |
| | | AGTGGAAGGTGGATAACGCCCTCCAATCGGGTA |
| | | ACTCCCAGGAGAGTGTCACAGAGCAGGACAGCA |
| | | AGGACAGCACCTACAGCCTCAGCAGCACCCTGA |
| | | CGCTGAGCAAAGCAGACTACGAGAAACACAAAG |
| | | TCTACGCCTGCGAAGTCACCCATCAGGGCCTGAG |
| | | CTCGCCCGTCACAAAGAGCTTCAACAGGGGAGA |
| | | GTGT |
| 259 | 5F8 (full length heavy chain) - NT Seq | GAGGTGCAGCTGGTGGAGTCCGGGGGAGGCTTA |
| | | GTTCAGCCTGGGGGGTCCCTGAGACTCTCCTGTG |
| | | CAGCCTCTGGATTCACCTTCAGTAGCTACTGGAT |
| | | GCACTGGGTCCGCCAAGCTCCAGGGAAGGGGCT |
| | | GGTGTGGGTCTCACGTATTATTAGTGATGGGAGT |
| | | AGCACAGGTTACGCGGATTCCGTGAAGGGCCGA |
| | | TTCACCATCTCCAGAGACAACGCCAAGAACACG |
| | | CTGTATCTGCAAATGAACAGTCTGAGAGCCGAG |
| | | GACACGGCTGTGTATTACTGTGCAAGAGAGTTTA |
| | | GCAGTGGCTGGTACTTTGACTACTGGGGCCAGGG |
| | | AACCCTGGTCACCGTCTCCTCAGCCTCCACCAAGGGC |
| | | CCATCGGTCTTCCCCCTGGCACCCTCCTCCAAGAGCACCTCTG |
| | | GGGGCACAGCGGCCCTGGGCTGCCTGGTCAAGGACTACTTCC |
| | | CCGAACCGGTGACGGTGTCGTGGAACTCAGGCGCCCTGACCA |
| | | GCGGCGTGCACACCTTCCCGGCTGTCCTACAGTCCTCAGGACT |
| | | CTACTCCCTCAGCAGCGTGGTGACCGTGCCCTCCAGCAGCTTG |
| | | GGCACCCAGACCTACATCTGCAACGTGAATCACAAGCCCAGC |
| | | AACACCAAGGTGGACAAGAAAGTTGAGCCCAAATCTTGTGAC |
| | | AAAACTCACACATGCCCACCGTGCCCAGCACCTGAACTCCTG |
| | | GGGGGACCGTCAGTCTTCCTCTTCCCCCCAAAACCCAAGGAC |
| | | ACCCTCATGATCTCCCGGACCCCTGAGGTCACATGCGTGGTG |
| | | GTGGACGTGAGCCACGAAGACCCTGAGGTCAAGTTCAACTGG |
| | | TACGTGGACGGCGTGGAGGTGCATAATGCCAAGACAAAGCC |
| | | GCGGGAGGAGCAGTACAACAGCACGTACCGTGTGGTCAGCGT |
| | | CCTCACCGTCCTGCACCAGGACTGGCTGAATGGCAAGGAGTA |
| | | CAAGTGCAAGGTCTCCAACAAAGCCCTCCCAGCCCCCATCGA |
| | | GAAAACCATCTCCAAAGCCAAAGGGCAGCCCCGAGAACCAC |
| | | AGGTGTACACCCTGCCCCCATCCCGGGATGAGCTGACCAAGA |
| | | ACCAGGTCAGCCTGACCTGCCTGGTCAAAGGCTTCTATCCCA |
| | | GCGACATCGCCGTGGAGTGGGAGAGCAATGGGCAGCCGGAG |
| | | AACAACTACAAGACCACGCCTCCCGTGCTGGACTCCGACGGC |
| | | TCCTTCTTCCTCTACAGCAAGCTCACCGTGGACAAGAGCAGG |
| | | TGGCAGCAGGGGAACGTCTTCTCATGCTCCGTGATGCATGAG |
| | | GCTCTGCACAACCACTACACGCAGAAGAGCCTCTCCCTGTCT |
| | | CCGGGTAAA |
| 260 | 5F8 (full length light chain 1) - NT Seq | GCCATCCAGTTGACCCAGTCTCCATCCTCCCTGT |
| | | CTGCATCTGTAGGAGACAGAGTCACCATCACTTG |
| | | CCGGGCAAGTCAGGGCATTAGCAGTGCTTTAGCC |
| | | TGGTATCAGCAGAAACCAGGGAAAGCTCCTAAG |
| | | CTCCTGATCTATGATGCCTCCAGTTTGGAAAGTG |
| | | GGGTCCCATCAAGGTTCAGCGGCAGTGGATCTG |
| | | GGACAGATTTCACTCTCACCATCAGCAGCCTGCA |
| | | GCCTGAAGATTTTGCAACTTATTACTGTCAACAG |
| | | TTTAGTAGTTACCCTCGGACGTTCGGCCAAGGGA |
| | | CCAAGGTGGAAATCAAACGAACTGTGGCTGCAC |
| | | CATCTGTCTTCATCTTCCCGCCATCTGATGAGCA |
| | | GTTGAAATCTGGAACTGCCTCTGTTGTGTGCCTG |
| | | CTGAATAACTTCTATCCCAGAGAGGCCAAAGTAC |
| | | AGTGGAAGGTGGATAACGCCCTCCAATCGGGTA |
| | | ACTCCCAGGAGAGTGTCACAGAGCAGGACAGCA |
| | | AGGACAGCACCTACAGCCTCAGCAGCACCCTGA |
| | | CGCTGAGCAAAGCAGACTACGAGAAACACAAAG |
| | | TCTACGCCTGCGAAGTCACCCATCAGGGCCTGAG |
| | | CTCGCCCGTCACAAAGAGCTTCAACAGGGGAGA |
| | | GTGT |
| 261 | 5F8 (full length light chain 2) - NT Seq | GACATCCAGATGACCCAGTCTCCATCCTCACTGT |
| | | CTGCATCTGTAGGAGACAGAGTCACCATCACTTG |
| | | TCGGGCGAGTCAGGGTATTAGCAGCTGGTTAGCC |
| | | TGGTATCAGCAGAAACCAGAGAAAGCCCCTAAG |
| | | TCCCTGATCTATGCTGCATCCAGTTTGCAAAGTG |
| | | GGGTCCCATCAAGGTTCAGCGGCAGTGGATCTG |
| | | GGACAGGTTTCACTCTCACCATCAGCAGCCTGCA |
| | | GCCTGAAGATTTTGCAACTTATTACTGCCAACAG |
| | | TATAATAGTTACCCTCGGACGTTCGGCCAAGGGA |
| | | CCAAGGTGGAAATCAAACGAACTGTGGCTGCAC |
| | | CATCTGTCTTCATCTTCCCGCCATCTGATGAGCA |
| | | GTTGAAATCTGGAACTGCCTCTGTTGTGTGCCTG |
| | | CTGAATAACTTCTATCCCAGAGAGGCCAAAGTAC |
| | | AGTGGAAGGTGGATAACGCCCTCCAATCGGGTA |
| | | ACTCCCAGGAGAGTGTCACAGAGCAGGACAGCA |
| | | AGGACAGCACCTACAGCCTCAGCAGCACCCTGA |
| | | CGCTGAGCAAAGCAGACTACGAGAAACACAAAG |
| | | TCTACGCCTGCGAAGTCACCCATCAGGGCCTGAG |
| | | CTCGCCCGTCACAAAGAGCTTCAACAGGGGAGA |
| | | GTGT |
| 262 | 6E11 (full length heavy chain) - NT Seq | GAAGTGCAGCTGGTGGAGTCTGGGGGAGCCTTG |
| | | GTACAGCCTGGCAGGTCCCTGAGACTCTCCTGTG |
| | | CAGCCTCTGGATTCACCTTTGATGATTATGCCAT |
| | | GCACTGGGTCCGGCAAGCTCCAGGGAAGGGCCT |
| | | GGAGTGGGTCTCAGGTATTACTTGGAATAGTGGT |
| | | GGCATAGGCTACGCGGACTCTGTGAAGGGCCGA |
| | | TTCACCATCTCCAGAGACAACGCCAAGAACTCCC |
| | | TGTATCTGCAAATGAACAGTCTGAGAGCTGAGG |
| | | ACACGGCCTTGTATTACTGTGCAAAAGATAGGTA |
| | | TTACAGCAGTTGGCTCCTCTTTGACAACTGGGGC |
| | | CAGGGAATTCTGGTCACCGTCTCCTCAGCCTCCACC |
| | | AAGGGCCCATCGGTCTTCCCCCTGGCACCCTCCTCCAAGAGC |
| | | ACCTCTGGGGGCACAGCGGCCCTGGGCTGCCTGGTCAAGGAC |
| | | TACTTCCCCGAACCGGTGACGGTGTCGTGGAACTCAGGCGCC |
| | | CTGACCAGCGGCGTGCACACCTTCCCGGCTGTCCTACAGTCCT |
| | | CAGGACTCTACTCCCTCAGCAGCGTGGTGACCGTGCCCTCCA |
| | | GCAGCTTGGGCACCCAGACCTACATCTGCAACGTGAATCACA |
| | | AGCCCAGCAACACCAAGGTGGACAAGAAAGTTGAGCCCAAA |
| | | TCTTGTGACAAAACTCACACATGCCCACCGTGCCCAGCACCT |
| | | GAACTCCTGGGGGGACCGTCAGTCTTCCTCTTCCCCCCAAAAC |
| | | CCAAGGACACCCTCATGATCTCCCGGACCCCTGAGGTCACAT |
| | | GCGTGGTGGTGGACGTGAGCCACGAAGACCCTGAGGTCAAGT |
| | | TCAACTGGTACGTGGACGGCGTGGAGGTGCATAATGCCAAGA |
| | | CAAAGCCGCGGGAGGAGCAGTACAACAGCACGTACCGTGTG |
| | | GTCAGCGTCCTCACCGTCCTGCACCAGGACTGGCTGAATGGC |
| | | AAGGAGTACAAGTGCAAGGTCTCCAACAAAGCCCTCCCAGCC |
| | | CCCATCGAGAAAACCATCTCCAAAGCCAAAGGGCAGCCCCGA |
| | | GAACCACAGGTGTACACCCTGCCCCCATCCCGGGATGAGCTG |
| | | ACCAAGAACCAGGTCAGCCTGACCTGCCTGGTCAAAGGCTTC |
| | | TATCCCAGCGACATCGCCGTGGAGTGGGAGAGCAATGGGCAG |
| | | CCGGAGAACAACTACAAGACCACGCCTCCCGTGCTGGACTCC |
| | | GACGGCTCCTTCTTCCTCTACAGCAAGCTCACCGTGGACAAG |
| | | AGCAGGTGGCAGCAGGGGAACGTCTTCTCATGCTCCGTGATG |
| | | CATGAGGCTCTGCACAACCACTACACGCAGAAGAGCCTCTCC |
| | | CTGTCTCCGGGTAAA |
| 263 | 6E11 (full length light chain 1) - | GAAATTGTGTTGACGCAGTCTCCAGGCACCCTGT |
| | NT Seq | CTTTGTCTCCAGGGGAAAGAGCCACCCTCTCCTG |
| | | CAGGGCCAGTCAGAGTGTTAGCAGCAGCTACTT |
| | | AGCCTGGTACCAGCAGAAACCTGGCCAGGCTCC |
| | | CAGGCTCCTCATCTATGGTGCATCCAGCAGGGCC |
| | | ACTGGCATCCCAGACAGGTTCAGTGGCAGTGGG |
| | | TCTGGGACAGACTTCACTCTCACCATCAGCAGAC |
| | | TGGAGCCTGAAGATTTTGCAGTGTATTACTGTCA |
| | | GCATTATGGTAGCTCATTCACTTTCGGCCCTGGG |
| | | ACCAAAGTGGATATCAAACGAACTGTGGCTGCA |
| | | CCATCTGTCTTCATCTTCCCGCCATCTGATGAGC |
| | | AGTTGAAATCTGGAACTGCCTCTGTTGTGTGCCT |
| | | GCTGAATAACTTCTATCCCAGAGAGGCCAAAGT |
| | | ACAGTGGAAGGTGGATAACGCCCTCCAATCGGG |
| | | TAACTCCCAGGAGAGTGTCACAGAGCAGGACAG |
| | | CAAGGACAGCACCTACAGCCTCAGCAGCACCCT |
| | | GACGCTGAGCAAAGCAGACTACGAGAAACACAA |
| | | AGTCTACGCCTGCGAAGTCACCCATCAGGGCCTG |
| | | AGCTCGCCCGTCACAAAGAGCTTCAACAGGGGA |
| | | GAGTGT |
| 264 | 7A11 (full length heavy chain) - NT Seq | GAAGTGCAGCTGGTGGAGTCTGGGGGAGGCTTG |
| | | GTACAGACTGGCAGGTCCCTGAGACTCTCCTGTG |
| | | CAGCCTCTGGATTCACCTTTGATGATTATGCCAT |
| | | GCACTGGGTCCGGCAAGCTCCAGGGAAGGGCCT |
| | | GGAGTGGGTCTCAGATATTAGTTGGAATAGTGAT |
| | | ATTATAGGCTATGCGGACTCTGTGAAGGGCCGAT |
| | | TCACCATCTCTAGAGACAACGCCAAGAACTCCCT |
| | | GTATCTGCAAATGAACAGTCTGAGAGCTGAGGA |
| | | CACGGCCTTGTATTACTGTGCAAAAGATATTTAT |
| | | GGTTCGGGGAGTTCTTTTTTTGACTACTGGGGCC |
| | | AGGGAATCCTGGTCACCGTCTCCTCAGCCTCCACCA |
| | | AGGGCCCATCGGTCTTCCCCCTGGCACCCTCCTCCAAGAGCA |
| | | CCTCTGGGGGCACAGCGGCCCTGGGCTGCCTGGTCAAGGACT |
| | | ACTTCCCCGAACCGGTGACGGTGTCGTGGAACTCAGGCGCCC |
| | | TGACCAGCGGCGTGCACACCTTCCCGGCTGTCCTACAGTCCTC |
| | | AGGACTCTACTCCCTCAGCAGCGTGGTGACCGTGCCCTCCAG |
| | | CAGCTTGGGCACCCAGACCTACATCTGCAACGTGAATCACAA |
| | | GCCCAGCAACACCAAGGTGGACAAGAAAGTTGAGCCCAAAT |
| | | CTTGTGACAAAACTCACACATGCCCACCGTGCCCAGCACCTG |
| | | AACTCCTGGGGGGACCGTCAGTCTTCCTCTTCCCCCCAAAACC |
| | | CAAGGACACCCTCATGATCTCCCGGACCCCTGAGGTCACATG |
| | | CGTGGTGGTGGACGTGAGCCACGAAGACCCTGAGGTCAAGTT |
| | | CAACTGGTACGTGGACGGCGTGGAGGTGCATAATGCCAAGAC |
| | | AAAGCCGCGGGAGGAGCAGTACAACAGCACGTACCGTGTGG |
| | | TCAGCGTCCTCACCGTCCTGCACCAGGACTGGCTGAATGGCA |
| | | AGGAGTACAAGTGCAAGGTCTCCAACAAAGCCCTCCCAGCCC |
| | | CCATCGAGAAAACCATCTCCAAAGCCAAAGGGCAGCCCCGA |
| | | GAACCACAGGTGTACACCCTGCCCCCATCCCGGGATGAGCTG |
| | | ACCAAGAACCAGGTCAGCCTGACCTGCCTGGTCAAAGGCTTC |
| | | TATCCCAGCGACATCGCCGTGGAGTGGGAGAGCAATGGGCAG |
| | | CCGGAGAACAACTACAAGACCACGCCTCCCGTGCTGGACTCC |
| | | GACGGCTCCTTCTTCCTCTACAGCAAGCTCACCGTGGACAAG |
| | | AGCAGGTGGCAGCAGGGGAACGTCTTCTCATGCTCCGTGATG |
| | | CATGAGGCTCTGCACAACCACTACACGCAGAAGAGCCTCTCC |
| | | CTGTCTCCGGGTAAA |
| 265 | 7A11 (full length light chain 1) - | GACATCCAGATGACCCAGTCTCCATCCTCACTGT |
| | NT Seq | CTGCATCTGTAGGAGACAGAGTCACCATCACTTG |
| | | TCGGGCGAGTCAGTATATTAGCAGCTGGTTAGCC |
| | | TGGTATCAGCAGAAACCAGAGAAAGCCCCTAAG |
| | | TCCCTGATCTATGCTGCATCCAGTTTGCAAAGTG |
| | | GGGTCCCATCAAGGTTCAGCGGCAGTGGATCTG |
| | | GGACAGATTTCACTCTCACCATCAGCAGCCTGCA |
| | | GCCTGAAGATTTTGCAACTTATTACTGCCAACAG |
| | | TATCATAGTTACCCTCCCACCTTCGGCCAAGGGA |
| | | CACGACTGGAGATTAAACGAACTGTGGCTGCAC |
| | | CATCTGTCTTCATCTTCCCGCCATCTGATGAGCA |
| | | GTTGAAATCTGGAACTGCCTCTGTTGTGTGCCTG |
| | | CTGAATAACTTCTATCCCAGAGAGGCCAAAGTAC |
| | | AGTGGAAGGTGGATAACGCCCTCCAATCGGGTA |
| | | ACTCCCAGGAGAGTGTCACAGAGCAGGACAGCA |
| | | AGGACAGCACCTACAGCCTCAGCAGCACCCTGA |
| | | CGCTGAGCAAAGCAGACTACGAGAAACACAAAG |
| | | TCTACGCCTGCGAAGTCACCCATCAGGGCCTGAG |
| | | CTCGCCCGTCACAAAGAGCTTCAACAGGGGAGA |
| | | GTGT |
| 266 | CD73.4.IgG2C219SIgG1.1f - Alternative | caggtgcagc tggtggagtc tgggggaggc |
| | NT Seq | gtggtccagc ctgggaggtc cctgagactc |
| | | tcctgtgcag cctctggatt caccttcagt |
| | | aactatggca tgcactgggt ccgccaggct |
| | | ccaggcaagg ggctggagtg ggtggcagtt |
| | | atattgtatg atggaagtaa taaatactat |
| | | ccagactccg tgaagggccg attcaccatc |
| | | tccagagaca attccaagaa cacgctgtat |
| | | ctgcaaatga acagcctgag agccgaggac |
| | | acggctgtgt attactgtgc gagagggggc |
| | | agcagctggt accctgattc ttttgatatc |
| | | tggggccaag gaacaatggt caccgtctct |
| | | tcagcgtcga ccaagggccc atcggtcttc |
| | | cccctggcgc cctgctccag gagcacctcc |
| | | gagagcacag cggccctggg ctgcctggtc |
| | | aaggactact tccccgaacc ggtgacggtg |
| | | tcgtggaact caggcgctct gaccagcggc |
| | | gtgcacacct tcccagctgt cctacagtcc |
| | | tcaggactct actccctcag cagcgtggtg |
| | | accgtgccct ccagcaactt cggcacccag |
| | | acctacacct gcaacgtaga tcacaagccc |
| | | agcaacacca aggtggacaa gacagttgag |
| | | cgcaaatcct gtgtcgagtg cccaccgtgc |
| | | ccagcaccac ctgtggcagg accgtcagtc |
| | | ttcctcttcc ccccaaaacc caaggacacc |
| | | ctcatgatct cccggacccc tgaggtcaca |
| | | tgcgtggtgg tggacgtgag ccacgaagac |
| | | cctgaggtca agttcaactg gtacgtggac |
| | | ggcgtggagg tgcataatgc caagacaaag |
| | | ccgcgggagg agcagtacaa cagcacgtac |
| | | cgtgtggtca gcgtcctcac cgtcctgcac |
| | | caggactggc tgaatggcaa ggagtacaag |
| | | tgcaaggtct ccaacaaagc cctcccaagc |
| | | agcatcgaga aaaccatctc caaagccaaa |
| | | gggcagcccc gagaaccaca ggtgtacacc |
| | | ctgcccccat cccgggagga gatgaccaag |
| | | aaccaggtca gcctgacctg cctggtcaaa |
| | | ggcttctatc ccagcgacat cgccgtggag |
| | | tgggagagca atgggcagcc ggagaacaac |
| | | tacaagacca cgcctcccgt gctggactcc |
| | | gacggctcct tcttcctcta tagcaagctc |
| | | accgtggaca agagcaggtg gcagcagggg |
| | | aacgtcttct catgctccgt gatgcatgag |
| | | gctctgcaca accactacac gcagaagagc |
| | | ctctccctgt ccccgggttg a |
| 267 | IgG1f | ASTKGPSVFPLAPSSKSTSGGTAALGCLVKDYFPEP |
| | | VTVSWNSGALTSGVHTFPAVLQSSGLYSLSSVVTVP |
| | | SSSLGTQTYICNVNHKPSNTKVDKRVEPKSCDKTHT |
| | | CPPCPAPELLGGPSVFLFPPKPKDTLMISRTPEVTC |
| | | VVVDVSHEDPEVKFNWYVDGVEVHNAKTKPREEQYN |
| | | STYRVVSVLTVLHQDWLNGKEYKCKVSNKALPAPIE |
| | | KTISKAKGQPREPQVYTLPPSREEMTKNQVSLTCLV |
| | | KGFYPSDIAVEWESNGQPENNYKTTPPVLDSDGSFF |
| | | LYSKLTVDKSRWQQGNVFSCSVMHEALHNHYTQKSL |
| | | SLSPGK |
| 268 | IgG2.3 | ASTKGPSVFPLAPCSRSTSESTAALGCLVKDYFPEP |
| | | VTVSWNSGALTSGVHTFPAVLQSSGLYSLSSVVTVP |
| | | SSNFGTQTYTCNVDHKPSNTKVDKTVERKSCVECPP |
| | | CPAPPVAGPSVFLFPPKPKDTLMISRTPEVTCVVVD |
| | | VSHEDPEVQFNWYVDGVEVHNAKTKPREEQFNSTFR |
| | | VVSVLTVVHQDWLNGKEYKCKVSNKGLPAPIEKTIS |
| | | KTKGQPREPQVYTLPPSREEMTKNQVSLTCLVKGFY |
| | | PSDIAVEWESNGQPENNYKTTPPMLDSDGSFFLYSK |
| | | LTVDKSRWQQGNVFSCSVMHEALHNHYTQKSLSLSP |
| | | GK |
| 269 | IgG2.3G1-AY | ASTKGPSVFPLAPCSRSTSESTAALGCLVKDYFPEP |
| | | VTVSWNSGALTSGVHTFPAVLQSSGLYSLSSVVTVP |
| | | SSNFGTQTYTCNVDHKPSNTKVDKTVERKSCVECPP |
| | | CPAPELLGGPSVFLFPPKPKDTLMISRTPEVTCVVV |
| | | DVSHEDPEVKFNWYVDGVEVHNAKTKPREEQYNSTY |
| | | RVVSVLTVLHQDWLNGKEYKCKVSNKALPAPIEKTI |
| | | SKAKGQPREPQVYTLPPSREEMTKNQVSLTCLVKGF |
| | | YPSDIAVEWESNGQPENNYKTTPPVLDSDGSFFLYS |
| | | KLTVDKSRWQQGNVFSCSVMHEALHNHYTQKSLSLS |
| | | PGK |
| 270 | IgG2.3G1-KH | ASTKGPSVFPLAPCSRSTSESTAALGCLVKDYFPEP |
| | | VTVSWNSGALTSGVHTFPAVLQSSGLYSLSSVVTVP |
| | | SSNFGTQTYTCNVDHKPSNTKVDKTVERKSCVECPP |
| | | CPAPPVAGPSVFLFPPKPKDTLMISRTPEVTCVVVD |
| | | VSHEDPEVKFNWYVDGVEVHNAKTKPREEQYNSTYR |
| | | VVSVLTVLHQDWLNGKEYKCKVSNKALPAPIEKTIS |
| | | KAKGQPREPQVYTLPPSREEMTKNQVSLTCLVKGFY |
| | | PSDIAVEWESNGQPENNYKTTPPVLDSDGSFFLYSK |
| | | LTVDKSRWQQGNVFSCSVMHEALHNHYTQKSLSLSP |
| | | GK |
| 271 | IgG2.5 | ASTKGPSVFPLAPSSRSTSESTAALGCLVKDYFPEP |
| | | VTVSWNSGALTSGVHTFPAVLQSSGLYSLSSVVTVP |
| | | SSNFGTQTYTCNVDHKPSNTKVDKTVERKCCVECPP |
| | | CPAPPVAGPSVFLFPPKPKDTLMISRTPEVTCVVVD |
| | | VSHEDPEVQFNWYVDGVEVHNAKTKPREEQFNSTFR |
| | | VVSVLTVVHQDWLNGKEYKCKVSNKGLPAPIEKTIS |
| | | KTKGQPREPQVYTLPPSREEMTKNQVSLTCLVKGFY |
| | | PSDIAVEWESNGQPENNYKTTPPMLDSDGSFFLYSK |
| | | LTVDKSRWQQGNVFSCSVMHEALHNHYTQKSLSLSP |
| | | GK |
| 272 | IgG1.1f | ASTKGPSVFPLAPSSKSTSGGTAALGCLVKDYFPEP |
| | | VTVSWNSGALTSGVHTFPAVLQSSGLYSLSSVVTVP |
| | | SSSLGTQTYICNVNHKPSNTKVDKRVEPKSCDKTHT |
| | | CPPCPAPEAEGAPSVFLFPPKPKDTLMISRTPEVTC |
| | | VVVDVSHEDPEVKFNWYVDGVEVHNAKTKPREEQYN |
| | | STYRVVSVLTVLHQDWLNGKEYKCKVSNKALPSSIE |
| | | KTISKAKGQPREPQVYTLPPSREEMTKNQVSLTCLV |
| | | KGFYPSDIAVEWESNGQPENNYKTTPPVLDSDGSFF |
| | | LYSKLTVDKSRWQQGNVFSCSVMHEALHNHYTQKSL |
| | | SLSPGK |
| 273 | IgG2.3G1.1f-KH | ASTKGPSVFPLAPCSRSTSESTAALGCLVKDYFPEP |
| | | VTVSWNSGALTSGVHTFPAVLQSSGLYSLSSVVTVP |
| | | SSNFGTQTYTCNVDHKPSNTKVDKTVERKSCVECPP |
| | | CPAPPVAGPSVFLFPPKPKDTLMISRTPEVTCVVVD |
| | | VSHEDPEVKFNWYVDGVEVHNAKTKPREEQYNSTYR |
| | | VVSVLTVLHQDWLNGKEYKCKVSNKALPSSIEKTIS |
| | | KAKGQPREPQVYTLPPSREEMTKNQVSLTCLVKGFY |
| | | PSDIAVEWESNGQPENNYKTTPPVLDSDGSFFLYSK |
| | | LTVDKSRWQQGNVFSCSVMHEALHNHYTQKSLSLSP |
| | | GK |
| 274 | IgG1-deltaTHT | ASTKGPSVFPLAPSSKSTSGGTAALGCLVKDYFPEP |
| | | VTVSWNSGALTSGVHTFPAVLQSSGLYSLSSVVTVP |
| | | SSSLGTQTYICNVNHKPSNTKVDKRVEPKSCDKCPP |
| | | CPAPELLGGPSVFLFPPKPKDTLMISRTPEVTCVVV |
| | | DVSHEDPEVKFNWYVDGVEVHNAKTKPREEQYNSTY |
| | | RVVSVLTVLHQDWLNGKEYKCKVSNKALPAPIEKTI |
| | | SKAKGQPREPQVYTLPPSREEMTKNQVSLTCLVKGF |
| | | YPSDIAVEWESNGQPENNYKTTPPVLDSDGSFELYS |
| | | KLTVDKSRWQQGNVFSCSVMHEALHNHYTQKSLSLS |
| | | PGK |
| 275 | IgG2.3-plusTHT | ASTKGPSVFPLAPCSRSTSESTAALGCLVKDYFPEP |
| | | VTVSWNSGALTSGVHTFPAVLQSSGLYSLSSVVTVP |
| | | SSNFGTQTYTCNVDHKPSNTKVDKTVERKSCVETHT |
| | | CPPCPAPPVAGPSVFLFPPKPKDTLMISRTPEVTCV |
| | | VVDVSHEDPEVQFNWYVDGVEVHNAKTKPREEQFNS |
| | | TFRVVSVLTVVHQDWLNGKEYKCKVSNKGLPAPIEK |
| | | TISKTKGQPREPQVYTLPPSREEMTKNQVSLTCLVK |
| | | GFYPSDIAVEWESNGQPENNYKTTPPMLDSDGSFEL |
| | | YSKLTVDKSRWQQGNVFSCSVMHEALHNHYTQKSLS |
| | | LSPGK |
| 276 | IgG2.3-plusGGG | ASTKGPSVFPLAPCSRSTSESTAALGCLVKDYFPEP |
| | | VTVSWNSGALTSGVHTFPAVLQSSGLYSLSSVVTVP |
| | | SSNFGTQTYTCNVDHKPSNTKVDKTVERKSCVEGGG |
| | | CPPCPAPPVAGPSVFLFPPKPKDTLMISRTPEVTCV |
| | | VVDVSHEDPEVQFNWYVDGVEVHNAKTKPREEQFNS |
| | | TFRVVSVLTVVHQDWLNGKEYKCKVSNKGLPAPIEK |
| | | TISKTKGQPREPQVYTLPPSREEMTKNQVSLTCLVK |
| | | GFYPSDIAVEWESNGQPENNYKTTPPMLDSDGSFEL |
| | | YSKLTVDKSRWQQGNVFSCSVMHEALHNHYTQKSLS |
| | | LSPGK |
| 277 | IgG2.5G1.1f-KH | ASTKGPSVFPLAPSSRSTSESTAALGCLVKDYFPEP |
| | | VTVSWNSGALTSGVHTFPAVLQSSGLYSLSSVVTVP |
| | | SSNFGTQTYTCNVDHKPSNTKVDKTVERKCCVECPP |
| | | CPAPPVAGPSVFLFPPKPKDTLMISRTPEVTCVVVD |
| | | VSHEDPEVKFNWYVDGVEVHNAKTKPREEQYNSTYR |
| | | VVSVLTVLHQDWLNGKEYKCKVSNKALPSSIEKTIS |
| | | KAKGQPREPQVYTLPPSREEMTKNQVSLTCLVKGFY |
| | | PSDIAVEWESNGQPENNYKTTPPVLDSDGSFFLYSK |
| | | LTVDKSRWQQGNVFSCSVMHEALHNHYTQKSLSLSP |
| | | GK |
| 278 | IgG2.5G1-AY | ASTKGPSVFPLAPSSRSTSESTAALGCLVKDYFPEP |
| | | VTVSWNSGALTSGVHTFPAVLQSSGLYSLSSVVTVP |
| | | SSNFGTQTYTCNVDHKPSNTKVDKTVERKCCVECPP |
| | | CPAPELLGGPSVFLFPPKPKDTLMISRTPEVTCVVV |
| | | DVSHEDPEVKFNWYVDGVEVHNAKTKPREEQYNSTY |
| | | RVVSVLTVLHQDWLNGKEYKCKVSNKALPAPIEKTI |
| | | SKAKGQPREPQVYTLPPSREEMTKNQVSLTCLVKGF |
| | | YPSDIAVEWESNGQPENNYKTTPPVLDSDGSFELYS |
| | | KLTVDKSRWQQGNVFSCSVMHEALHNHYTQKSLSLS |
| | | PGK |
| 279 | IgG2.5G1-KH | ASTKGPSVFPLAPSSRSTSESTAALGCLVKDYFPEP |
| | | VTVSWNSGALTSGVHTFPAVLQSSGLYSLSSVVTVP |
| | | SSNFGTQTYTCNVDHKPSNTKVDKTVERKCCVECPP |
| | | CPAPPVAGPSVFLFPPKPKDTLMISRTPEVTCVVVD |
| | | VSHEDPEVKFNWYVDGVEVHNAKTKPREEQYNSTYR |
| | | VVSVLTVLHQDWLNGKEYKCKVSNKALPAPIEKTIS |
| | | KAKGQPREPQVYTLPPSREEMTKNQVSLTCLVKGFY |
| | | PSDIAVEWESNGQPENNYKTTPPVLDSDGSFFLYSK |
| | | LTVDKSRWQQGNVFSCSVMHEALHNHYTQKSLSLSP |
| | | GK |
| 280 | IgG2.5-plusTHT | ASTKGPSVFPLAPSSRSTSESTAALGCLVKDYFPEP |
| | | VTVSWNSGALTSGVHTFPAVLQSSGLYSLSSVVTVP |
| | | SSNFGTQTYTCNVDHKPSNTKVDKTVERKCCVETHT |
| | | CPPCPAPPVAGPSVFLFPPKPKDTLMISRTPEVTCV |
| | | VVDVSHEDPEVQFNWYVDGVEVHNAKTKPREEQFNS |
| | | TFRVVSVLTVVHQDWLNGKEYKCKVSNKGLPAPIEK |
| | | TISKTKGQPREPQVYTLPPSREEMTKNQVSLTCLVK |
| | | GFYPSDIAVEWESNGQPENNYKTTPPMLDSDGSFFL |
| | | YSKLTVDKSRWQQGNVFSCSVMHEALHNHYTQKSLS |
| | | LSPGK |
| 281 | IgG1-G2.3G1-AY | ASTKGPSVFPLAPSSKSTSGGTAALGCLVKDYFPEP |
| | | VTVSWNSGALTSGVHTFPAVLQSSGLYSLSSVVTVP |
| | | SSSLGTQTYICNVNHKPSNTKVDKRVERKSCVECPP |
| | | CPAPELLGGPSVFLFPPKPKDTLMISRTPEVTCVVV |
| | | DVSHEDPEVKFNWYVDGVEVHNAKTKPREEQYNSTY |
| | | RVVSVLTVLHQDWLNGKEYKCKVSNKALPAPIEKTI |
| | | SKAKGQPREPQVYTLPPSREEMTKNQVSLTCLVKGF |
| | | YPSDIAVEWESNGQPENNYKTTPPVLDSDGSFFLYS |
| | | KLTVDKSRWQQGNVFSCSVMHEALHNHYTQKSLSLS |
| | | PGK |
| 282 | IgG1-G2.3G1-KH | ASTKGPSVFPLAPSSKSTSGGTAALGCLVKDYFPEP |
| | | VTVSWNSGALTSGVHTFPAVLQSSGLYSLSSVVTVP |
| | | SSSLGTQTYICNVNHKPSNTKVDKRVERKSCVECPP |
| | | CPAPPVAGPSVFLFPPKPKDTLMISRTPEVTCVVVD |
| | | VSHEDPEVKFNWYVDGVEVHNAKTKPREEQYNSTYR |
| | | VVSVLTVLHQDWLNGKEYKCKVSNKALPAPIEKTIS |
| | | KAKGQPREPQVYTLPPSREEMTKNQVSLTCLVKGFY |
| | | PSDIAVEWESNGQPENNYKTTPPVLDSDGSFFLYSK |
| | | LTVDKSRWQQGNVFSCSVMHEALHNHYTQKSLSLSP |
| | | GK |
| 283 | CD73 from Figure 27A | XCPRAARAPATLLLALGAVLWPAAGAWELTILHTND |
| | | VHSRLEQTSEDSSKCVNASRCMGGVARLFTKVQQIR |
| | | RAEPNVLLLDAGDQYQGTIWFTVYKGAEVAHFMNAL |
| | | RYDAMALGNHEFDNGVEGLIEPLLKEAKFPILSANI |
| | | KAKGPLASQISGLYLPYKVLPVGDEVVGIVGYTSKE |
| | | TPFLSNPGTNLVFEDEITALQPEVDKLKTLNVNKII |
| | | ALGHSGFEMDKLIAQKVRGVDVVVGGHSNTFLYTGN |
| | | PPSKEVPAGKYPFIVTSDDGRKVPVVQAYAFGKYLG |
| | | YLKIEFDERGNVISSHGNPILLNSSIPEDPSIKADI |
| | | NKWRIKLDNYSTQELGKTIVYLDGSSQSCRFRECNM |
| | | GNLICDAMINNNLRHADETFWNHVSMCILNGGGIRS |
| | | PIDERNNGTITWENLAAVLPFGGTFDLVQLKGSTLK |
| | | KAFEHSVHRYGQSTGEFLQVGGIHVVYDLSRKPGDR |
| | | VVKLDVLCTKCRVPSYDPLKMDEVYKVILPNFLANG |
| | | GDGFQMIKDELLRHDSGDQDINVVSTYISKMKVIYP |
| | | AVEGRIKHHHHHH |
| 284 | Hinge region amino acid | VDKRV |
| 285 | Hinge region amino acid | VDKTV |
| 286 | Hinge region amino acid | EPKSCDKTHT |
| 287 | Hinge region amino acid | ELKTPLGDTTHT |
| 288 | Hinge region amino acid | EPKS |
| 289 | Hinge region amino acid | ESKYGPP |
| 290 | Hinge region amino acid | CPPCP |
| 291 | Hinge region amino acid | CCVECPPCP |
| 292 | Hinge region amino acid | CPRCP (EPKSCDTPPPCPRCP)₃ |
| 293 | Hinge region amino acid | CPRCP (EPKSCDTPPPCPRCP)₂ |
| 294 | Hinge region amino acid | CPRCP (EPKSCDTPPPCPRCP)₁ |
| 295 | Hinge region amino acid | CDTPPPCPRCP (EPKSCDTPPPCPRCP)₂ |
| 296 | Hinge region amino acid | CDTPPPCPRCP |
| 297 | Hinge region amino acid | CPSCP |
| 298 | Hinge region amino acid | APELLGG |
| 299 | Hinge region amino acid | APPVAG |
| 300 | G2-G1-G1-G1 | ASTKGPSVFPLAPCSRSTSESTAALGCLVKDYFPE |
| | | PVTVSWNSGALTSGVHTFPAVLQSSGLYSLSSVVT |
| | | VPSSNFGTQTYTCNVDHKPSNTKVDKTVERKSCDK |
| | | THTCPPCPAPELLGGPSVFLFPPKPKDTLMISRTP |
| | | EVTCVVVDVSHEDPEVKFNWYVDGVEVHNAKTKPR |
| | | EEQYNSTYRVVSVLTVLHQDWLNGKEYKCKVSNKA |
| | | LPAPIEKTISKAKGQPREPQVYTLPPSREEMTKNQ |
| | | VSLTCLVKGFYPSDIAVEWESNGQPENNYKTTPPV |
| | | LDSDGSFFLYSKLTVDKSRWQQGNVFSCSVMHEAL |
| | | HNHYTQKSLSLSPGK |
| 301 | G2.5-G1-G1-G1 | ASTKGPSVFPLAPSSRSTSESTAALGCLVKDYFPE |
| | | PVTVSWNSGALTSGVHTFPAVLQSSGLYSLSSVVT |
| | | VPSSNFGTQTYTCNVDHKPSNTKVDKTVERKSCDK |
| | | THTCPPCPAPELLGGPSVFLFPPKPKDTLMISRTP |
| | | EVTCVVVDVSHEDPEVKFNWYVDGVEVHNAKTKPR |
| | | EEQYNSTYRVVSVLTVLHQDWLNGKEYKCKVSNKA |
| | | LPAPIEKTISKAKGQPREPQVYTLPPSREEMTKNQ |
| | | VSLTCLVKGFYPSDIAVEWESNGQPENNYKTTPPV |
| | | LDSDGSFFLYSKLTVDKSRWQQGNVFSCSVMHEAL |
| | | HNHYTQKSLSLSPGK |
| 302 | G1-G2.3-G2-G2 | ASTKGPSVFPLAPSSKSTSGGTAALGCLVKDYFPE |
| | | PVTVSWNSGALTSGVHTFPAVLQSSGLYSLSSVVT |
| | | VPSSSLGTQTYICNVNHKPSNTKVDKRVEPKSCVE |
| | | CPPCPAPPVAGPSVFLFPPKPKDTLMISRTPEVTC |
| | | VVVDVSHEDPEVQFNWYVDGVEVHNAKTKPREEQF |
| | | NSTFRVVSVLTVVHQDWLNGKEYKCKVSNKGLPAP |
| | | IEKTISKTKGQPREPQVYTLPPSREEMTKNQVSLT |
| | | CLVKGFYPSDIAVEWESNGQPENNYKTTPPMLDSD |
| | | GSFFLYSKLTVDKSRWQQGNVFSCSVMHEALHNHY |
| | | TQKSLSLSPGK |
| 303 | G1-KRGEGSSNLF | ASTKGPSVFPLAPSSRSTSESTAALGCLVKDYFPE |
| | | PVTVSWNSGALTSGVHTFPAVLQSSGLYSLSSVVT |
| | | VPSSNFGTQTYICNVNHKPSNTKVDKRVEPKSCDK |
| | | THTCPPCPAPELLGGPSVFLFPPKPKDTLMISRTP |
| | | EVTCVVVDVSHEDPEVKFNWYVDGVEVHNAKTKPR |
| | | EEQYNSTYRVVSVLTVLHQDWLNGKEYKCKVSNKA |
| | | LPAPIEKTISKAKGQPREPQVYTLPPSREEMTKNQ |
| | | VSLTCLVKGFYPSDIAVEWESNGQPENNYKTTPPV |
| | | LDSDGSFFLYSKLTVDKSRWQQGNVFSCSVMHEAL |
| | | HNHYTQKSLSLSPGK |
| 304 | G1-KRGEGS | ASTKGPSVFPLAPSSRSTSESTAALGCLVKDYFPE |
| | | PVTVSWNSGALTSGVHTFPAVLQSSGLYSLSSVVT |
| | | VPSSSLGTQTYICNVNHKPSNTKVDKRVEPKSCDK |
| | | THTCPPCPAPELLGGPSVFLFPPKPKDTLMISRTP |
| | | EVTCVVVDVSHEDPEVKFNWYVDGVEVHNAKTKPR |
| | | EEQYNSTYRVVSVLTVLHQDWLNGKEYKCKVSNKA |
| | | LPAPIEKTISKAKGQPREPQVYTLPPSREEMTKNQ |
| | | VSLTCLVKGFYPSDIAVEWESNGQPENNYKTTPPV |
| | | LDSDGSFFLYSKLTVDKSRWQQGNVFSCSVMHEAL |
| | | HNHYTQKSLSLSPGK |
| 305 | G1-SNLF | ASTKGPSVFPLAPSSKSTSGGTAALGCLVKDYFPE |
| | | PVTVSWNSGALTSGVHTFPAVLQSSGLYSLSSVVT |
| | | VPSSNFGTQTYICNVNHKPSNTKVDKRVEPKSCDK |
| | | THTCPPCPAPELLGGPSVFLFPPKPKDTLMISRTP |
| | | EVTCVVVDVSHEDPEVKFNWYVDGVEVHNAKTKPR |
| | | EEQYNSTYRVVSVLTVLHQDWLNGKEYKCKVSNKA |
| | | LPAPIEKTISKAKGQPREPQVYTLPPSREEMTKNQ |
| | | VSLTCLVKGFYPSDIAVEWESNGQPENNYKTTPPV |
| | | LDSDGSFFLYSKLTVDKSRWQQGNVFSCSVMHEAL |
| | | HNHYTQKSLSLSPGK |
| 306 | IgG1-ITNDRTPR | ASTKGPSVFPLAPSSKSTSGGTAALGCLVKDYFPE |
| | | PVTVSWNSGALTSGVHTFPAVLQSSGLYSLSSVVT |
| | | VPSSSLGTQTYTCNVDHKPSNTKVDKTVERKSCDK |
| | | THTCPPCPAPELLGGPSVFLFPPKPKDTLMISRTP |
| | | EVTCVVVDVSHEDPEVKFNWYVDGVEVHNAKTKPR |
| | | EEQYNSTYRVVSVLTVLHQDWLNGKEYKCKVSNKA |
| | | LPAPIEKTISKAKGQPREPQVYTLPPSREEMTKNQ |
| | | VSLTCLVKGFYPSDIAVEWESNGQPENNYKTTPPV |
| | | LDSDGSFFLYSKLTVDKSRWQQGNVFSCSVMHEAL |
| | | HNHYTQKSLSLSPGK |
| 307 | G1-SNLFPR | ASTKGPSVFPLAPSSKSTSGGTAALGCLVKDYFPE |
| | | PVTVSWNSGALTSGVHTFPAVLQSSGLYSLSSVVT |
| | | VPSSNFGTQTYICNVNHKPSNTKVDKRVERKSCDK |
| | | THTCPPCPAPELLGGPSVFLFPPKPKDTLMISRTP |
| | | EVTCVVVDVSHEDPEVKFNWYVDGVEVHNAKTKPR |
| | | EEQYNSTYRVVSVLTVLHQDWLNGKEYKCKVSNKA |
| | | LPAPIEKTISKAKGQPREPQVYTLPPSREEMTKNQ |
| | | VSLTCLVKGFYPSDIAVEWESNGQPENNYKTTPPV |
| | | LDSDGSFFLYSKLTVDKSRWQQGNVFSCSVMHEAL |
| | | HNHYTQKSLSLSPG |
| 308 | G2-RKEGSGNSFL | ASTKGPSVFPLAPCSKSTSGGTAALGCLVKDYFPE |
| | | PVTVSWNSGALTSGVHTFPAVLQSSGLYSLSSVVT |
| | | VPSSSLGTQTYTCNVDHKPSNTKVDKTVERKSCVE |
| | | CPPCPAPPVAGPSVFLFPPKPKDTLMISRTPEVTC |
| | | VVVDVSHEDPEVQFNWYVDGVEVHNAKTKPREEQF |
| | | NSTFRVVSVLTVVHQDWLNGKEYKCKVSNKGLPAP |
| | | IEKTISKTKGQPREPQVYTLPPSREEMTKNQVSLT |
| | | CLVKGFYPSDIAVEWESNGQPENNYKTTPPMLDSD |
| | | GSFFLYSKLTVDKSRWQQGNVFSCSVMHEALHNHY |
| | | TQKSLSLSPGK |
| 309 | G2-RKEGSG | ASTKGPSVFPLAPCSKSTSGGTAALGCLVKDYFPE |
| | | PVTVSWNSGALTSGVHTFPAVLQSSGLYSLSSVVT |
| | | VPSSNFGTQTYTCNVDHKPSNTKVDKTVERKSCVE |
| | | CPPCPAPPVAGPSVFLFPPKPKDTLMISRTPEVTC |
| | | VVVDVSHEDPEVQFNWYVDGVEVHNAKTKPREEQF |
| | | NSTFRVVSVLTVVHQDWLNGKEYKCKVSNKGLPAP |
| | | IEKTISKTKGQPREPQVYTLPPSREEMTKNQVSLT |
| | | CLVKGFYPSDIAVEWESNGQPENNYKTTPPMLDSD |
| | | GSFFLYSKLTVDKSRWQQGNVFSCSVMHEALHNHY |
| | | TQKSLSLSPGK |
| 310 | G2-NSFL | ASTKGPSVFPLAPCSRSTSESTAALGCLVKDYFPE |
| | | PVTVSWNSGALTSGVHTFPAVLQSSGLYSLSSVVT |
| | | VPSSSLGTQTYTCNVDHKPSNTKVDKTVERKSCVE |
| | | CPPCPAPPVAGPSVFLFPPKPKDTLMISRTPEVTC |
| | | VVVDVSHEDPEVQFNWYVDGVEVHNAKTKPREEQF |
| | | NSTFRVVSVLTVVHQDWLNGKEYKCKVSNKGLPAP |
| | | IEKTISKTKGQPREPQVYTLPPSREEMTKNQVSLT |
| | | CLVKGFYPSDIAVEWESNGQPENNYKTTPPMLDSD |
| | | GSFFLYSKLTVDKSRWQQGNVFSCSVMHEALHNHY |
| | | TQKSLSLSPGK |
| 311 | IgG2-TIDNTRRP | ASTKGPSVFPLAPCSRSTSESTAALGCLVKDYFPE |
| | | PVTVSWNSGALTSGVHTFPAVLQSSGLYSLSSVVT |
| | | VPSSNFGTQTYICNVNHKPSNTKVDKRVEPKSCVE |
| | | CPPCPAPPVAGPSVFLFPPKPKDTLMISRTPEVTC |
| | | VVVDVSHEDPEVQFNWYVDGVEVHNAKTKPREEQF |
| | | NSTFRVVSVLTVVHQDWLNGKEYKCKVSNKGLPAP |
| | | IEKTISKTKGQPREPQVYTLPPSREEMTKNQVSLT |
| | | CLVKGFYPSDIAVEWESNGQPENNYKTTPPMLDSD |
| | | GSFFLYSKLTVDKSRWQQGNVFSCSVMHEALHNHY |
| | | TQKSLSLSPGK |
| 312 | G2-NSFLRP | ASTKGPSVFPLAPCSRSTSESTAALGCLVKDYFPE |
| | | PVTVSWNSGALTSGVHTFPAVLQSSGLYSLSSVVT |
| | | VPSSSLGTQTYTCNVDHKPSNTKVDKTVEPKSCVE |
| | | CPPCPAPPVAGPSVFLFPPKPKDTLMISRTPEVTC |
| | | VVVDVSHEDPEVQFNWYVDGVEVHNAKTKPREEQF |
| | | NSTFRVVSVLTVVHQDWLNGKEYKCKVSNKGLPAP |
| | | IEKTISKTKGQPREPQVYTLPPSREEMTKNQVSLT |
| | | CLVKGFYPSDIAVEWESNGQPENNYKTTPPMLDSD |
| | | GSFFLYSKLTVDKSRWQQGNVFSCSVMHEALHNHY |
| | | TQKSLSLSPGK |
| 313 | G1-G1-G2-G1-AY | ASTKGPSVFPLAPSSKSTSGGTAALGCLVKDYFPE |
| | | PVTVSWNSGALTSGVHTFPAVLQSSGLYSLSSVVT |
| | | VPSSSLGTQTYICNVNHKPSNTKVDKRVEPKSCDK |
| | | THTCPPCPAPELLGGPSVFLFPPKPKDTLMISRTP |
| | | EVTCVVVDVSHEDPEVQFNWYVDGVEVHNAKTKPR |
| | | EEQFNSTFRVVSVLTVVHQDWLNGKEYKCKVSNKG |
| | | LPAPIEKTISKTKGQPREPQVYTLPPSREEMTKNQ |
| | | VSLTCLVKGFYPSDIAVEWESNGQPENNYKTTPPV |
| | | LDSDGSFFLYSKLTVDKSRWQQGNVFSCSVMHEAL |
| | | HNHYTQKSLSLSPGK |
| 314 | G1-G1-G2-G1-KH | ASTKGPSVFPLAPSSKSTSGGTAALGCLVKDYFPE |
| | | PVTVSWNSGALTSGVHTFPAVLQSSGLYSLSSVVT |
| | | VPSSSLGTQTYICNVNHKPSNTKVDKRVEPKSCDK |
| | | THTCPPCPAPPVAGPSVFLFPPKPKDTLMISRTPE |
| | | VTCVVVDVSHEDPEVQFNWYVDGVEVHNAKTKPRE |
| | | EQFNSTFRVVSVLTVVHQDWLNGKEYKCKVSNKGL |
| | | PAPIEKTISKTKGQPREPQVYTLPPSREEMTKNQV |
| | | SLTCLVKGFYPSDIAVEWESNGQPENNYKTTPPVL |
| | | DSDGSFFLYSKLTVDKSRWQQGNVFSCSVMHEALH |
| | | NHYTQKSLSLSPGK |
| 315 | G2-G2.3-G1-G2-KH | ASTKGPSVFPLAPCSRSTSESTAALGCLVKDYFPE |
| | | PVTVSWNSGALTSGVHTFPAVLQSSGLYSLSSVVT |
| | | VPSSNFGTQTYTCNVDHKPSNTKVDKTVERKSCVE |
| | | CPPCPAPPVAGPSVFLFPPKPKDTLMISRTPEVTC |
| | | VVVDVSHEDPEVKFNWYVDGVEVHNAKTKPREEQY |
| | | NSTYRVVSVLTVLHQDWLNGKEYKCKVSNKALPAP |
| | | IEKTISKAKGQPREPQVYTLPPSREEMTKNQVSLT |
| | | CLVKGFYPSDIAVEWESNGQPENNYKTTPPMLDSD |
| | | GSFFLYSKLTVDKSRWQQGNVFSCSVMHEALHNHY |
| | | TQKSLSLSPGK |
| 316 | G2.5-G2.3-G1-G2-KH | ASTKGPSVFPLAPSRSTSESTAALGCLVKDYFPE |
| | | PVTVSWNSGALTSGVHTFPAVLQSSGLYSLSSVVT |
| | | VPSSNFGTQTYTCNVDHKPSNTKVDKTVERKSCVE |
| | | CPPCPAPPVAGPSVFLFPPKPKDTLMISRTPEVTC |
| | | VVVDVSHEDPEVKFNWYVDGVEVHNAKTKPREEQY |
| | | NSTYRVVSVLTVLHQDWLNGKEYKCKVSNKALPAP |
| | | IEKTISKAKGQPREPQVYTLPPSREEMTKNQVSLT |
| | | CLVKGFYPSDIAVEWESNGQPENNYKTTPPMLDSD |
| | | GSFFLYSKLTVDKSRWQQGNVFSCSVMHEALHNHY |
| | | TQKSLSLSPGK |
| 317 | G2-G2.3-G1-G2-AY | ASTKGPSVFPLAPCSRSTSESTAALGCLVKDYFPE |
| | | PVTVSWNSGALTSGVHTFPAVLQSSGLYSLSSVVT |
| | | VPSSNFGTQTYTCNVDHKPSNTKVDKTVERKSCVE |
| | | CPPCPAPELLGGPSVFLFPPKPKDTLMISRTPEVT |
| | | CVVVDVSHEDPEVKFNWYVDGVEVHNAKTKPREEQ |
| | | YNSTYRVVSVLTVLHQDWLNGKEYKCKVSNKALPA |
| | | PIEKTISKAKGQPREPQVYTLPPSREEMTKNQVSL |
| | | TCLVKGFYPSDIAVEWESNGQPENNYKTTPPMLDS |
| | | DGSFFLYSKLTVDKSRWQQGNVFSCSVMHEALHNH |
| | | YTQKSLSLSPG |
| 318 | G2.5-G2.3-G1-G2-AY | ASTKGPSVFPLAPSSRSTSESTAALGCLVKDYFPE |
| | | PVTVSWNSGALTSGVHTFPAVLQSSGLYSLSSVVT |
| | | VPSSNFGTQTYTCNVDHKPSNTKVDKTVERKSCVE |
| | | CPPCPAPELLGGPSVFLFPPKPKDTLMISRTPEVT |
| | | CVVVDVSHEDPEVKFNWYVDGVEVHNAKTKPREEQ |
| | | YNSTYRVVSVLTVLHQDWLNGKEYKCKVSNKALPA |
| | | PIEKTISKAKGQPREPQVYTLPPSREEMTKNQVSL |
| | | TCLVKGFYPSDIAVEWESNGQPENNYKTTPPMLDS |
| | | DGSFFLYSKLTVDKSRWQQGNVFSCSVMHEALHNH |
| | | YTQKSLSLSPGK |
| 319 | G1-G2.3-G1-G1-KH | ASTKGPSVFPLAPSSKSTSGGTAALGCLVKDYFPE |
| | | PVTVSWNSGALTSGVHTFPAVLQSSGLYSLSSVVT |
| | | VPSSSLGTQTYICNVNHKPSNTKVDKRVEPKSCVE |
| | | CPPCPAPPVAGPSVFLFPPKPKDTLMISRTPEVTC |
| | | VVVDVSHEDPEVKFNWYVDGVEVHNAKTKPREEQY |
| | | NSTYRVVSVLTVLHQDWLNGKEYKCKVSNKALPAP |
| | | IEKTISKAKGQPREPQVYTLPPSREEMTKNQVSLT |
| | | CLVKGFYPSDIAVEWESNGQPENNYKTTPPVLDSD |
| | | GSFFLYSKLTVDKSRWQQGNVFSCSVMHEALHNHY |
| | | TQKSLSLSPGK |
| 320 | G2-G1-G2-G2-AY | ASTKGPSVFPLAPCSRSTSESTAALGCLVKDYFPE |
| | | PVTVSWNSGALTSGVHTFPAVLQSSGLYSLSSVVT |
| | | VPSSNFGTQTYTCNVDHKPSNTKVDKTVERKSCDK |
| | | THTCPPCPAPELLGGPSVFLFPPKPKDTLMISRTP |
| | | EVTCVVVDVSHEDPEVQFNWYVDGVEVHNAKTKPR |
| | | EEQFNSTFRVVSVLTVVHQDWLNGKEYKCKVSNKG |
| | | LPAPIEKTISKTKGQPREPQVYTLPPSREEMTKNQ |
| | | VSLTCLVKGFYPSDIAVEWESNGQPENNYKTTPPM |
| | | LDSDGSFFLYSKLTVDKSRWQQGNVFSCSVMHEAL |
| | | HNHYTQKSLSLSPGK |
| 321 | G2.5-G1-G2-G2-AY | ASTKGPSVFPLAPSSRSTSESTAALGCLVKDYFPE |
| | | PVTVSWNSGALTSGVHTFPAVLQSSGLYSLSSVVT |
| | | VPSSNFGTQTYTCNVDHKPSNTKVDKTVERKSCDK |
| | | THTCPPCPAPELLGGPSVFLFPPKPKDTLMISRTP |
| | | EVTCVVVDVSHEDPEVQFNWYVDGVEVHNAKTKPR |
| | | EEQFNSTFRVVSVLTVVHQDWLNGKEYKCKVSNKG |
| | | LPAPIEKTISKTKGQPREPQVYTLPPSREEMTKNQ |
| | | VSLTCLVKGFYPSDIAVEWESNGQPENNYKTTPPM |
| | | LDSDGSFFLYSKLTVDKSRWQQGNVFSCSVMHEAL |
| | | HNHYTQKSLSLSPGK |
| 322 | G1-G2-G1-G1-AY | ASTKGPSVFPLAPSSKSTSGGTAALGCLVKDYFPE |
| | | PVTVSWNSGALTSGVHTFPAVLQSSGLYSLSSVVT |
| | | VPSSSLGTQTYICNVNHKPSNTKVDKRVEPKSCVE |
| | | CPPCPAPELLGGPSVFLFPPKPKDTLMISRTPEVT |
| | | CVVVDVSHEDPEVKFNWYVDGVEVHNAKTKPREEQ |
| | | YNSTYRVVSVLTVLHQDWLNGKEYKCKVSNKALPA |
| | | PIEKTISKAKGQPREPQVYTLPPSREEMTKNQVSL |
| | | TCLVKGFYPSDIAVEWESNGQPENNYKTTPPVLDS |
| | | DGSFFLYSKLTVDKSRWQQGNVFSCSVMHEALHNH |
| | | YTQKSLSLSPGK |
| 323 | G2-G1-G2-G2-KH | ASTKGPSVFPLAPCSRSTSESTAALGCLVKDYFPE |
| | | PVTVSWNSGALTSGVHTFPAVLQSSGLYSLSSVVT |
| | | VPSSNFGTQTYTCNVDHKPSNTKVDKTVERKSCDK |
| | | THTCPPCPAPPVAGPSVFLFPPKPKDTLMISRTPE |
| | | VTCVVVDVSHEDPEVQFNWYVDGVEVHNAKTKPRE |
| | | EQFNSTFRVVSVLTVVHQDWLNGKEYKCKVSNKGL |
| | | PAPIEKTISKTKGQPREPQVYTLPPSREEMTKNQV |
| | | SLTCLVKGFYPSDIAVEWESNGQPENNYKTTPPML |
| | | DSDGSFFLYSKLTVDKSRWQQGNVFSCSVMHEALH |
| | | NHYTQKSLSLSPG |
| 324 | G2.5-G1-G2-G2-KH | ASTKGPSVFPLAPSSRSTSESTAALGCLVKDYFPE |
| | | PVTVSWNSGALTSGVHTFPAVLQSSGLYSLSSVVT |
| | | VPSSNFGTQTYTCNVDHKPSNTKVDKTVERKSCDK |
| | | THTCPPCPAPPVAGPSVFLFPPKPKDTLMISRTPE |
| | | VTCVVVDVSHEDPEVQFNWYVDGVEVHNAKTKPRE |
| | | EQFNSTFRVVSVLTVVHQDWLNGKEYKCKVSNKGL |
| | | PAPIEKTISKTKGQPREPQVYTLPPSREEMTKNQV |
| | | SLTCLVKGFYPSDIAVEWESNGQPENNYKTTPPML |
| | | DSDGSFFLYSKLTVDKSRWQQGNVFSCSVMHEALH |
| | | NHYTQKSLSLSPGK |
| 325 | IgGl-deltaHinge | ASTKGPSVFPLAPSSKSTSGGTAALGCLVKDYFPE |
| | | PVTVSWNSGALTSGVHTFPAVLQSSGLYSLSSVVT |
| | | VPSSSLGTQTYICNVNHKPSNTKVDKRVEPKCPPC |
| | | PAPELLGGPSVFLFPPKPKDTLMISRTPEVTCVVV |
| | | DVSHEDPEVKFNWYVDGVEVHNAKTKPREEQYNST |
| | | YRVVSVLTVLHQDWLNGKEYKCKVSNKALPAPIEK |
| | | TISKAKGQPREPQVYTLPPSREEMTKNQVSLTCLV |
| | | KGFYPSDIAVEWESNGQPENNYKTTPPVLDSDGSF |
| | | FLYSKLTVDKSRWQQGNVFSCSVMHEALHNHYTQK |
| | | SLSLSPGK |
| 326 | IgG2-deltaHinge | ASTKGPSVFPLAPCSRSTSESTAALGCLVKDYFPE |
| | | PVTVSWNSGALTSGVHTFPAVLQSSGLYSLSSVVT |
| | | VPSSNFGTQTYTCNVDHKPSNTKVDKTVERKCPPC |
| | | PAPPVAGPSVFLFPPKPKDTLMISRTPEVTCVVVD |
| | | VSHEDPEVQFNWYVDGVEVHNAKTKPREEQFNSTF |
| | | RVVSVLTVVHQDWLNGKEYKCKVSNKGLPAPIEKT |
| | | ISKTKGQPREPQVYTLPPSREEMTKNQVSLTCLVK |
| | | GFYPSDIAVEWESNGQPENNYKTTPPMLDSDGSFF |
| | | LYSKLTVDKSRWQQGNVFSCSVMHEALHNHYTQKS |
| | | LSLSPGK |
| 327 | IgG2.5-deltaHinge | ASTKGPSVFPLAPSRSTSESTAALGCLVKDYFPE |
| | | PVTVSWNSGALTSGVHTFPAVLQSSGLYSLSSVVT |
| | | VPSSNFGTQTYTCNVDHKPSNIKVDKTVERKCPPC |
| | | PAPPVAGPSVFLFPPKPKDTLMISRTPEVTCVVVD |
| | | VSHEDPEVQFNWYVDGVEVHNAKTKPREEQFNSTF |
| | | RVVSVLTVVHQDWLNGKEYKCKVSNKGLPAPIEKT |
| | | ISKTKGQPREPQVYTLPPSREEMTKNQVSLTCLVK |
| | | GFYPSDIAVEWESNGQPENNYKTTPPMLDSDGSFF |
| | | LYSKLTVDKSRWQQGNVFSCSVMHEALHNHYTQKS |
| | | LSLSPGK |
| 328 | IgG1-de1taG237 | ASTKGPSVFPLAPSSKSTSGGTAALGCLVKDYFPE |
| | | PVTVSWNSGALTSGVHTFPAVLQSSGLYSLSSVVT |
| | | VPSSSLGTQTYICNVNHKPSNTKVDKRVEPKSCDK |
| | | THTCPPCPAPELLGPSVFLFPPKPKDTLMISRTPE |
| | | VTCVVVDVSHEDPEVKFNWYVDGVEVHNAKTKPRE |
| | | EQYNSTYRVVSVLTVLHQDWLNGKEYKCKVSNKAL |
| | | PAPIEKTISKAKGQPREPQVYTLPPSREEMTKNQV |
| | | SLTCLVKGFYPSDIAVEWESNGQPENNYKTTPPVL |
| | | DSDGSFFLYSKLTVDKSRWQQGNVFSCSVMHEALH |
| | | NHYTQKSLSLSPG |
| 329 | IgG2-plus G237 | ASTKGPSVFPLAPCSRSTSESTAALGCLVKDYFPE |
| | | PVTVSWNSGALTSGVHTFPAVLQSSGLYSLSSVVT |
| | | VPSSNFGTQTYTCNVDHKPSNTKVDKTVERKSCVE |
| | | CPPCPAPPVAGGPSVFLFPPKPKDTLMISRTPEVT |
| | | CVVVDVSHEDPEVQFNWYVDGVEVHNAKTKPREEQ |
| | | FNSTFRVVSVLTVVHQDWLNGKEYKCKVSNKGLPA |
| | | PIEKTISKTKGQPREPQVYTLPPSREEMTKNQVSL |
| | | TCLVKGFYPSDIAVEWESNGQPENNYKTTPPMLDS |
| | | DGSFFLYSKLTVDKSRWQQGNVFSCSVMHEALHNH |
| | | YTQKSLSLSPGK |
| 330 | IgG2.4 | ASTKGPSVFPLAPCSRSTSESTAALGCLVKDYFPE |
| | | PVTVSWNSGALTSGVHTFPAVLQSSGLYSLSSVVT |
| | | VPSSNFGTQTYTCNVDHKPSNTKVDKTVERKCSVE |
| | | CPPCPAPPVAGPSVFLFPPKPKDTLMISRTPEVTC |
| | | VVVDVSHEDPEVQFNWYVDGVEVHNAKTKPREEQF |
| | | NSTFRVVSVLTVVHQDWLNGKEYKCKVSNKGLPAP |
| | | IEKTISKTKGQPREPQVYTLPPSREEMTKNQVSLT |
| | | CLVKGFYPSDIAVEWESNGQPENNYKTTPPMLDSD |
| | | GSFFLYSKLTVDKSRWQQGNVFSCSVMHEALHNHY |
| | | TQKSLSLSPGK |
| 331 | IgG2.3/4 | ASTKGPSVFPLAPCSRSTSESTAALGCLVKDYFPE |
| | | PVTVSWNSGALTSGVHTFPAVLQSSGLYSLSSVVT |
| | | VPSSNFGTQTYTCNVDHKPSNTKVDKTVERKSSVE |
| | | CPPCPAPPVAGPSVFLFPPKPKDTLMISRTPEVTC |
| | | VVVDVSHEDPEVQFNWYVDGVEVHNAKTKPREEQF |
| | | NSTFRVVSVLTVVHQDWLNGKEYKCKVSNKGLPAP |
| | | IEKTISKTKGQPREPQVYTLPPSREEMTKNQVSLT |
| | | CLVKGFYPSDIAVEWESNGQPENNYKTTPPMLDSD |
| | | GSFFLYSKLTVDKSRWQQGNVFSCSVMHEALHNHY |
| | | TQKSLSLSPGK |
| 332 | IgG2.3-V13 | ASTKGPSVFPLAPCSRSTSESTAALGCLVKDYFPEPVT |
| | | VSWNSGALTSGVHTFPAVLQSSGLYSLSSVVTVPSSNF |
| | | GTQTYTCNVDHKPSNTKVDKTVERKSCVECPPCPAPPV |
| | | AGDSVFLFPPKPKDTLMISRTPEVTCVVVDVSHEDPEV |
| | | QFNWYVDGVEVHNAKTKPREEQFNSTFRVVSVLTVVHQ |
| | | DWLNGKEYKCKVSNKGLPAPIEKTISKTKGQPREPQVY |
| | | TLPPSREEMTKNQVSLTCLVKGFYPSDIAVEWESNGQP |
| | | ENNYKTTPPMLDSDGSFFLYSKLTVDKSRWQQGNVFSC |
| | | SVMHEALHNHYTQKSLSLSPGK |
| 333 | IgG2.3-V14 | ASTKGPSVFPLAPCSRSTSESTAALGCLVKDYFPEPVT |
| | | VSWNSGALTSGVHTFPAVLQSSGLYSLSSVVTVPSSNF |
| | | GTQTYTCNVDHKPSNTKVDKTVERKSCVECPPCPAPPV |
| | | AGDSVFLFPPKPKDTLMISRTPEVTCVVVDVSHEDGEV |
| | | QFNWYVDGVEVHNAKTKPREEQFNSTFRVVSVLTVVHQ |
| | | DWLNGKEYKCKVSNKGLPAPIEKTISKTKGQPREPQVY |
| | | TLPPSREEMTKNQVSLTCLVKGFYPSDIAVEWESNGQP |
| | | ENNYKTTPPMLDSDGSFFLYSKLTVDKSRWQQGNVFSC |
| | | SVMHEALHNHYTQKSLSLSPGK |
| 334 | IgG2.3-V15 | ASTKGPSVFPLAPCSRSTSESTAALGCLVKDYFPEPVT |
| | | VSWNSGALTSGVHTFPAVLQSSGLYSLSSVVTVPSSNF |
| | | GTQTYTCNVDHKPSNTKVDKTVERKSCVECPPCPAPPV |
| | | AGDSVFLFPPKPKDTLMISRTPEVTCVVVDVSDEDGEV |
| | | QFNWYVDGVEVHNAKTKPREEQFNSTFRVVSVLTVVHQ |
| | | DWLNGKEYKCKVSNKGLPAPIEKTISKTKGQPREPQVY |
| | | TLPPSREEMTKNQVSLTCLVKGFYPSDIAVEWESNGQP |
| | | ENNYKTTPPMLDSDGSFFLYSKLTVDKSRWQQGNVFSC |
| | | SVMHEALHNHYTQKSLSLSPGK |
| 335 | IgG2.3-V16 | ASTKGPSVFPLAPCSRSTSESTAALGCLVKDYFPEPVT |
| | | VSWNSGALTSGVHTFPAVLQSSGLYSLSSVVTVPSSNF |
| | | GTQTYTCNVDHKPSNTKVDKTVERKSCVECPPCPAPPV |
| | | AGDSVFLFPPKPKDTLMISRTPEVTCVVVDVSHEDGEV |
| | | QFNWYVDGVEVHNAKTKPREEQFNSTFRVVSVLTVVHQ |
| | | DWLNGKEYKCKVSNKGLPRPIEKTISKTKGQPREPQVY |
| | | TLPPSREEMTKNQVSLTCLVKGFYPSDIAVEWESNGQP |
| | | ENNYKTTPPMLDSDGSFFLYSKLTVDKSRWQQGNVFSC |
| | | SVMHEALHNHYTQKSLSLSPGK |
| 336 | IgG2.3-V17 | ASTKGPSVFPLAPCSRSTSESTAALGCLVKDYFPEPVT |
| | | VSWNSGALTSGVHTFPAVLQSSGLYSLSSVVTVPSSNF |
| | | GTQTYTCNVDHKPSNTKVDKTVERKSCVECPPCPAPPV |
| | | AGDSVFLFPPKPKDTLMISRTPEVTCVVVDVSDEDGEV |
| | | QFNWYVDGVEVHNAKTKPREEQFNSTFRVVSVLTVVHQ |
| | | DWLNGKEYKCKVSNKGLPRPIEKTISKTKGQPREPQVY |
| | | TLPPSREEMTKNQVSLTCLVKGFYPSDIAVEWESNGQP |
| | | ENNYKTTPPMLDSDGSFFLYSKLTVDKSRWQQGNVFSC |
| | | SVMHEALHNHYTQKSLSLSPGK |
| 337 | IgG2.3-V18 | ASTKGPSVFPLAPCSRSTSESTAALGCLVKDYFPEPVT |
| | | VSWNSGALTSGVHTFPAVLQSSGLYSLSSVVTVPSSNF |
| | | GTQTYTCNVDHKPSNTKVDKTVERKSCVECPPCPAPPV |
| | | AGPSVFLFPPKPKDTLMISRTPEVTCVVVDVEHEDPEV |
| | | QFNWYVDGVEVHNAKTKPREEQFNSTFRVVSVLTVVHQ |
| | | DWLNGKEYKCKVSNKGLPAPIEKTISKTKGQPREPQVY |
| | | TLPPSREEMTKNQVSLTCLVKGFYPSDIAVEWESNGQP |
| | | ENNYKTTPPMLDSDGSFFLYSKLTVDKSRWQQGNVFSC |
| | | SVMHEALHNHYTQKSLSLSPGK |
| 338 | IgG2.3-V19 | ASTKGPSVFPLAPCSRSTSESTAALGCLVKDYFPEPVT |
| | | VSWNSGALTSGVHTFPAVLQSSGLYSLSSVVTVPSSNF |
| | | GTQTYTCNVDHKPSNTKVDKTVERKSCVECPPCPAPPV |
| | | AGPSVFLFPPKPKDTLMISRTPEVTCVVVDVEHEDPEV |
| | | QFNWYVDGVEVHNAKTKPREEQFNSTFRVVSVLTVVHQ |
| | | DWLNGKEYKCKVSNKGFPAPIEKTISKTKGQPREPQVY |
| | | TLPPSREEMTKNQVSLTCLVKGFYPSDIAVEWESNGQP |
| | | ENNYKTTPPMLDSDGSFFLYSKLTVDKSRWQQGNVFSC |
| | | SVMHEALHNHYTQKSLSLSPGK |
| 339 | IgG2.3G1-AY-V20 | ASTKGPSVFPLAPCSRSTSESTAALGCLVKDYFPEPVT |
| | | VSWNSGALTSGVHTFPAVLQSSGLYSLSSVVTVPSSNF |
| | | GTQTYTCNVDHKPSNTKVDKTVERKSCVECPPCPAPEL |
| | | LGGDSVFLFPPKPKDTLMISRTPEVTCVVVDVSHEDPE |
| | | VKFNWYVDGVEVHNAKTKPREEQYNSTYRVVSVLTVLH |
| | | QDWLNGKEYKCKVSNKALPAPIEKTISKAKGQPREPQV |
| | | YTLPPSREEMTKNQVSLTCLVKGFYPSDIAVEWESNGQ |
| | | PENNYKTTPPVLDSDGSFFLYSKLTVDKSRWQQGNVFS |
| | | CSVMHEALHNHYTQKSLSLSPGK |
| 340 | IgG2.3G1-AY-V21 | ASTKGPSVFPLAPCSRSTSESTAALGCLVKDYFPEPVT |
| | | VSWNSGALTSGVHTFPAVLQSSGLYSLSSVVTVPSSNF |
| | | GTQTYTCNVDHKPSNTKVDKTVERKSCVECPPCPAPEL |
| | | LGGDSVFLFPPKPKDTLMISRTPEVTCVVVDVSHEDGE |
| | | VKFNWYVDGVEVHNAKTKPREEQYNSTYRVVSVLTVLH |
| | | QDWLNGKEYKCKVSNKALPAPIEKTISKAKGQPREPQV |
| | | YTLPPSREEMTKNQVSLTCLVKGFYPSDIAVEWESNGQ |
| | | PENNYKTTPPVLDSDGSFFLYSKLTVDKSRWQQGNVFS |
| | | CSVMHEALHNHYTQKSLSLSPGK |
| 341 | IgG2.3G1-AY-V22 | ASTKGPSVFPLAPCSRSTSESTAALGCLVKDYFPEPVT |
| | | VSWNSGALTSGVHTFPAVLQSSGLYSLSSVVTVPSSNF |
| | | GTQTYTCNVDHKPSNTKVDKTVERKSCVECPPCPAPEL |
| | | LGGDSVFLFPPKPKDTLMISRTPEVTCVVVDVSDEDGE |
| | | VKFNWYVDGVEVHNAKTKPREEQYNSTYRVVSVLTVLH |
| | | QDWLNGKEYKCKVSNKALPAPIEKTISKAKGQPREPQV |
| | | YTLPPSREEMTKNQVSLTCLVKGFYPSDIAVEWESNGQ |
| | | PENNYKTTPPVLDSDGSFFLYSKLTVDKSRWQQGNVFS |
| | | CSVMHEALHNHYTQKSLSLSPGK |
| 342 | IgG2.3GI-AY-V23 | ASTKGPSVFPLAPCSRSTSESTAALGCLVKDYFPEPVT |
| | | VSWNSGALTSGVHTFPAVLQSSGLYSLSSVVTVPSSNF |
| | | GTQTYTCNVDHKPSNTKVDKTVERKSCVECPPCPAPEL |
| | | LGGDSVFLFPPKPKDTLMISRTPEVTCVVVDVSHEDGE |
| | | VKFNWYVDGVEVHNAKTKPREEQYNSTYRVVSVLTVLH |
| | | QDWLNGKEYKCKVSNKALPRPIEKTISKAKGQPREPQV |
| | | YTLPPSREEMTKNQVSLTCLVKGFYPSDIAVEWESNGQ |
| | | PENNYKTTPPVLDSDGSFFLYSKLTVDKSRWQQGNVFS |
| | | CSVMHEALHNHYTQKSLSLSPGK |
| 343 | IgG2.3GI-AY-V24 | ASTKGPSVFPLAPCSRSTSESTAALGCLVKDYFPEPVT |
| | | VSWNSGALTSGVHTFPAVLQSSGLYSLSSVVTVPSSNF |
| | | GTQTYTCNVDHKPSNTKVDKTVERKSCVECPPCPAPEL |
| | | LGGDSVFLFPPKPKDTLMISRTPEVTCVVVDVSDEDGE |
| | | VKFNWYVDGVEVHNAKTKPREEQYNSTYRVVSVLTVLH |
| | | QDWLNGKEYKCKVSNKALPRPIEKTISKAKGQPREPQV |
| | | YTLPPSREEMTKNQVSLTCLVKGFYPSDIAVEWESNGQ |
| | | PENNYKTTPPVLDSDGSFFLYSKLTVDKSRWQQGNVFS |
| | | CSVMHEALHNHYTQKSLSLSPGK |
| 344 | IgG2.3GI-AY-V25 | ASTKGPSVFPLAPCSRSTSESTAALGCLVKDYFPEPVT |
| | | VSWNSGALTSGVHTFPAVLQSSGLYSLSSVVTVPSSNF |
| | | GTQTYTCNVDHKPSNTKVDKTVERKSCVECPPCPAPEL |
| | | LGDDSVFLFPPKPKDTLMISRTPEVTCVVVDVSDEDGE |
| | | VKFNWYVDGVEVHNAKTKPREEQYNSTYRVVSVLTVLH |
| | | QDWLNGKEYKCKVSNKALPRPIEKTISKAKGQPREPQV |
| | | YTLPPSREEMTKNQVSLTCLVKGFYPSDIAVEWESNGQ |
| | | PENNYKTTPPVLDSDGSFFLYSKLTVDKSRWQQGNVFS |
| | | CSVMHEALHNHYTQKSLSLSPGK |
| 345 | IgG2.3GI-AY-V26 | ASTKGPSVFPLAPCSRSTSESTAALGCLVKDYFPEPVT |
| | | VSWNSGALTSGVHTFPAVLQSSGLYSLSSVVTVPSSNF |
| | | GTQTYTCNVDHKPSNTKVDKTVERKSCVECPPCPAPEL |
| | | LGDDSVFLFPPKPKDTLMISRTPEVTCVVVDVSDEDGE |
| | | VKFNWYVDGVEVHNAKTKPREEQYNSTYRVVSVLTVLH |
| | | QDWLNGKEYKCKVSNKALPRPIEKTISKAKGQPREPQV |
| | | YTLPPSREEMTKNQVSLTCLVKGFYPSDIAVEWESNGQ |
| | | PENNYKTTPPVLDSDGSFFLYSKLTVDKSRWQQGNVFS |
| | | CSVMHEALHNHYTQKSLSLSPGK |
| 346 | IgG2.3GI-AY-V27 | ASTKGPSVFPLAPCSRSTSESTAALGCLVKDYFPEPVT |
| | | VSWNSGALTSGVHTFPAVLQSSGLYSLSSVVTVPSSNF |
| | | GTQTYTCNVDHKPSNTKVDKTVERKSCVECPPCPAPEL |
| | | LGGPSVFLFPPKPKDTLMISRTPEVTCVVVDVEHEDPE |
| | | VKFNWYVDGVEVHNAKTKPREEQYNSTYRVVSVLTVLH |
| | | QDWLNGKEYKCKVSNKALPAPIEKTISKAKGQPREPQV |
| | | YTLPPSREEMTKNQVSLTCLVKGFYPSDIAVEWESNGQ |
| | | PENNYKTTPPVLDSDGSFFLYSKLTVDKSRWQQGNVFS |
| | | CSVMHEALHNHYTQKSLSLSPGK |
| 347 | IgG2.3GI-AY-V28 | ASTKGPSVFPLAPCSRSTSESTAALGCLVKDYFPEPVT |
| | | VSWNSGALTSGVHTFPAVLQSSGLYSLSSVVTVPSSNF |
| | | GTQTYTCNVDHKPSNTKVDKTVERKSCVECPPCPAPEL |
| | | LGGPSVFLFPPKPKDTLMISRTPEVTCVVVDVEHEDPE |
| | | VKFNWYVDGVEVHNAKTKPREEQYNSTYRVVSVLTVLH |
| | | QDWLNGKEYKCKVSNKAFPAPIEKTISKAKGQPREPQV |
| | | YTLPPSREEMTKNQVSLTCLVKGFYPSDIAVEWESNGQ |
| | | PENNYKTTPPVLDSDGSFFLYSKLTVDKSRWQQGNVFS |
| | | CSVMHEALHNHYTQKSLSLSPGK |
| 348 | Alternative hinge | ERKCCVECPPCPAPPVAG |
| 349 | Alternative hinge | ERKSCVECPPCPAPPVAG |
| 350 | Alternative hinge | ERKCSVECPPCPAPPVAG |
| 351 | Alternative hinge | ERKXCVECPPCPAPPVAG |
| 352 | Alternative hinge | ERKCXVECPPCPAPPVAG |
| 353 | Alternative hinge | ERKCCVECPPCPAPPVAGX |
| 354 | Alternative hinge | ERKSCVECPPCPAPPVAGX |
| 355 | Alternative hinge | ERKCSVECPPCPAPPVAGX |
| 356 | Alternative hinge | ERKXCVECPPCPAPPVAGX |
| 357 | Alternative hinge | ERKCXVECPPCPAPPVAGX |
| 358 | Alternative hinge | ERKCCVECPPCPAPELLGG |
| 359 | Alternative hinge | ERKSCVECPPCPAPELLGG |
| 360 | Alternative hinge | ERKCCSVECPPCPAPELLGG |
| 361 | Alternative hinge | ERKXCVECPPCPAPELLGG |
| 362 | Alternative hinge | ERKCXVECPPCPAPELLGG |
| 363 | Alternative hinge | ERKCCVECPPCPAPELLG |
| 364 | Alternative hinge | ERKSCVECPPCPAPELLG |
| 365 | Alternative hinge | ERKCCSVECPPCPAPELLG |
| 366 | Alternative hinge | ERKXCVECPPCPAPELLG |
| 367 | Alternative hinge | ERKCXVECPPCPAPELLG |
| 368 | Alternative hinge | ERKCCVECPPCPAP |
| 369 | Alternative hinge | ERKSCVECPPCPAP |
| 370 | Alternative hinge | ERKCSVECPPCPAP |
| 371 | Alternative hinge | ERKXCVECPPCPAP |
| 372 | Alternative hinge | ERKCXVECPPCPAP |
| 373 | Portion of hinge | PVAG |
| 374 | Portion of hinge | ELLG |
| 375 | Portion of hinge | ELLGG |
| 376 | Portion of hinge | SCDKTHT |
| 377 | Portion of hinge | CCVE |
| 378 | wt IgG2 CH1 domain | ASTKGPSVFPLAPCSRSTSESTAALGCLVKDYFPEP |
| | | VTVSWNSGALTSGVHTFPAVLQSSGLYSLSSVVTV |
| | | PSSNFGTQTYTCNVDHKPSNTKVDKTV |
| 379 | IgG2 CH1 and hinge | ASTKGPSVFPLAPCSRSTSESTAALGCLVKDYFPEP |
| | | VTVSWNSGALTSGVHTFPAVLQSSGLYSLSSVVTV |
| | | PSSNFGTQTYTCNVDHKPSNTKVDKTV [symbol] |
| | | [symbol] |
| 380 | Portion of hinge | CPPCPAP |
| 381 | Heavy chain variable region of nivolumab | QVQLVESGGGVVQPGRSLRLDCKASGITFSNSGMH |
| | | WVRQAPGKGLEWVAVIWYDGSKRYYADSVKGRF |
| | | TISRDNSKNTLFLQMNSLRAEDTAVYYCATNDDY |
| | | WGQGTLVTVSS |
| 382 | Light chain variable region of nivolumab | EIVLTQSPATLSLSPGERATLSCRASQSVSSYLAWY |
| | | QQKPGQAPRLLIYDASNRATGIPARFSGSGSGTDFT |
| | | LTISSLEPEDFAVYYCQQSSNWPRTFGQGTKVEIK |
| 383 | Heavy chain CDR1 of nivolumab | NSGMH |
| 384 | Heavy chain CDR2 of nivolumab | VIWYDGSKRYYADSVKG |
| 385 | Heavy chain CDR3 of nivolumab | NDDY |
| 386 | Light chain CDR1 of nivolumab | RASQSVSSYLA |
| 387 | Light chain CDR2 of nivolumab | DASNRAT |
| 388 | Light chain CDR2 of nivolumab | QQSSNWPRT |
| 389 | Heavy chain variable region of nivolumab | cag gtg cag ctg gtg gag tct ggg gga |
| | (nucleic acid sequence) | ggc gtg gtc cag cct ggg agg tcc ctg |
| | | aga ctc gac tgt aaa gcg tct gga atc |
| | | acc ttc agt aac tct ggc atg cac tgg |
| | | gtc cgc cag gct cca ggc aag ggg ctg |
| | | gag tgg gtg gca gtt att tgg tat gat |
| | | gga agt aaa aga tac tat gca gac tcc |
| | | gtg aag ggc cga ttc acc atc tcc aga |
| | | gac aat tcc aag aac acg ctg ttt ctg |
| | | caa atg aac agc ctg aga gcc gag gac |
| | | acg gct gtg tat tac tgt gcg aca aac |
| | | gac gac tac tgg ggc cag gga acc ctg |
| | | gtc acc gtc tcc tca |
| 390 | Light chain variable region of nivolumab | gaa att gtg ttg aca cag tct cca gcc |
| | (nucleic acid sequence) | acc ctg tct ttg tct cca ggg gaa aga |
| | | gcc acc ctc tcc tgc agg gcc agt cag |
| | | agt gtt agt agt tac tta gcc tgg tac |
| | | caa cag aaa cct ggc cag gct ccc agg |
| | | ctc ctc atc tat gat gca tcc aac agg |
| | | gcc act ggc atc cca gcc agg ttc agt |
| | | ggc agt ggg tct ggg aca gac ttc act |
| | | ctc acc atc agc agc cta gag cct gaa |
| | | gat ttt gca gtt tat tac tgt cag cag |
| | | agt agc aac tgg cct cgg acg ttc ggc |
| | | caa ggg acc aag gtg gaa atc aaa |
| 391 | IgG2.3G1-AY-V9-D270E | ASTKGPSVFPLAPCSRSTSESTAALGCLVKDYFPEP |
| | | VTVSWNSGALTSGVHTFPAVLQSSGLYSLSSVVTV |
| | | PSSNFGTQTYTCNVDHKPSNTKVDKTVERKSCVEC |
| | | PPCPAPELLGDDSVFLFPPKPKDTLMISRTPEVTCV |
| | | VVDVSHEEGEVKFNWYVDGVEVHNAKTKPREEQ |
| | | YNSTYRVVSVLTVLHQDWLNGKEYKCKVSNKALP |
| | | RPIEKTISKAKGQPREPQVYTLPPSREEMTKNQVSL |
| | | TCLVKGFYPSDIAVEWESNGQPENNYKTTPPVLDS |
| | | DGSFFLYSKLTVDKSRWQQGNVFSCSVMHEALHN |
| | | HYTQKSLSLSPGK |
| 392 | IgG2.3G1-AY-V11 | ASTKGPSVFPLAPCSRSTSESTAALGCLVKDYFPEP |
| | | VTVSWNSGALTSGVHTFPAVLQSSGLYSLSSVVTV |
| | | PSSNFGTQTYTCNVDHKPSNTKVDKTVERKSCVEC |
| | | PPCPAPELLGDDSVFLFPPKPKDTLMISRTPEVTCV |
| | | VVDVSDEDGEVKFNWYVDGVEVHNAKTKPREEQ |
| | | YNSTYRVVSVLTVLHQDWLNGKEYKCKVSNKALP |
| | | RPIEKTISKAKGQPREPQVYTLPPSREEMTKNQVSL |
| | | TCLVKGFYPSDIAVEWESNGQPENNYKTTPPVLDS |
| | | DGSFFLYSKLTVDKSRWQQGNVFSCSVMHEALHN |
| | | HYTQKSLSLSPGK |
| 393 | IgG2.5G1-AY-V9-D270E | ASTKGPSVFPLAPSSRSTSESTAALGCLVKDYFPEP |
| | | VTVSWNSGALTSGVHTFPAVLQSSGLYSLSSVVTV |
| | | PSSNFGTQTYTCNVDHKPSNTKVDKTVERKCCVEC |
| | | PPCPAPELLGDDSVFLFPPKPKDTLMISRTPEVTCV |
| | | VVDVSHEEGEVKFNWYVDGVEVHNAKTKPREEQ |
| | | YNSTYRVVSVLTVLHQDWLNGKEYKCKVSNKALP |
| | | RPIEKTISKAKGQPREPQVYTLPPSREEMTKNQVSL |
| | | TCLVKGFYPSDIAVEWESNGQPENNYKTTPPVLDS |
| | | DGSFFLYSKLTVDKSRWQQGNVFSCSVMHEALHN |
| | | HYTQKSLSLSPGK |
| 394 | IgG2.5G1-AY-V11 | ASTKGPSVFPLAPSSRSTSESTAALGCLVKDYFPEP |
| | | VTVSWNSGALTSGVHTFPAVLQSSGLYSLSSVVTV |
| | | PSSNFGTQTYTCNVDHKPSNTKVDKTVERKCCVEC |
| | | PPCPAPELLGDDSVFLFPPKPKDTLMISRTPEVTCV |
| | | VVDVSDEDGEVKFNWYVDGVEVHNAKTKPREEQ |
| | | YNSTYRVVSVLTVLHQDWLNGKEYKCKVSNKALP |
| | | RPIEKTISKAKGQPREPQVYTLPPSREEMTKNQVSL |
| | | TCLVKGFYPSDIAVEWESNGQPENNYKTTPPVLDS |
| | | DGSFFLYSKLTVDKSRWQQGNVFSCSVMHEALHN |
| | | HYTQKSLSLSPGK |
| 395 | IgG1f-GASDALIE | ASTKGPSVFPLAPSSKSTSGGTAALGCLVKDYFPEP |
| | | VTVSWNSGALTSGVHTFPAVLQSSGLYSLSSVVTV |
| | | PSSSLGTQTYICNVNHKPSNTKVDKRVEPKSCDKT |
| | | HTCPPCPAPELLAGPDVFLFPPKPKDTLMISRTPEVT |
| | | CVVVDVSHEDPEVKFNWYVDGVEVHNAKTKPRE |
| | | EQYNSTYRVVSVLTVLHQDWLNGKEYKCKVSNK |
| | | ALPLPEEKTISKAKGQPREPQVYTLPPSREEMTKNQ |
| | | VSLTCLVKGFYPSDIAVEWESNGQPENNYKTTPPV |
| | | LDSDGSFFLYSKLTVDKSRWQQGNVFSCSVMHEA |
| | | LHNHYTQKSLSLSPGK |
| 396 | IgG1f-G236A | ASTKGPSVFPLAPSSKSTSGGTAALGCLVKDYFPEP |
| | | VTVSWNSGALTSGVHTFPAVLQSSGLYSLSSVVTV |
| | | PSSSLGTQTYICNVNHKPSNTKVDKRVEPKSCDKT |
| | | HTCPPCPAPELLAGPSVFLFPPKPKDTLMISRTPEVT |
| | | CVVVDVSHEDPEVKFNWYVDGVEVHNAKTKPRE |
| | | EQYNSTYRVVSVLTVLHQDWLNGKEYKCKVSNK |
| | | ALPAPIEKTISKAKGQPREPQVYTLPPSREEMTKNQ |
| | | VSLTCLVKGFYPSDIAVEWESNGQPENNYKTTPPV |
| | | LDSDGSFFLYSKLTVDKSRWQQGNVFSCSVMHEA |
| | | LHNHYTQKSLSLSPGK |
| 397 | IgG2.3G1-AY-G236A | ASTKGPSVFPLAPCSRSTSESTAALGCLVKDYFPEP |
| | | VTVSWNSGALTSGVHTFPAVLQSSGLYSLSSVVTV |
| | | PSSNFGTQTYTCNVDHKPSNTKVDKTVERKSCVEC |
| | | PPCPAPELLAGPSVFLFPPKPKDTLMISRTPEVTCVV |
| | | VDVSHEDPEVKFNWYVDGVEVHNAKTKPREEQY |
| | | NSTYRVVSVLTVLHQDWLNGKEYKCKVSNKALPA |
| | | PIEKTISKAKGQPREPQVYTLPPSREEMTKNQVSLT |
| | | CLVKGFYPSDIAVEWESNGQPENNYKTTPPVLDSD |
| | | GSFFLYSKLTVDKSRWQQGNVFSCSVMHEALHNH |
| | | YTQKSLSLSPGK |
| 398 | IgG2.3G1-AY-GASDALIE | ASTKGPSVFPLAPCSRSTSESTAALGCLVKDYFPEP |
| | | VTVSWNSGALTSGVHTFPAVLQSSGLYSLSSVVTV |
| | | PSSNFGTQTYTCNVDHKPSNTKVDKTVERKSCVEC |
| | | PPCPAPELLAGPDVFLFPPKPKDTLMISRTPEVTCV |
| | | VVDVSHEDPEVKFNWYVDGVEVHNAKTKPREEQ |
| | | YNSTYRVVSVLTVLHQDWLNGKEYKCKVSNKALP |
| | | LPEEKTISKAKGQPREPQVYTLPPSREEMTKNQVSL |
| | | TCLVKGFYPSDIAVEWESNGQPENNYKTTPPVLDS |
| | | DGSFFLYSKLTVDKSRWQQGNVFSCSVMHEALHN |
| | | HYTQKSLSLSPGK |
| 399 | IgG2.5G1-AY-G236A | ASTKGPSVFPLAPSSRSTSESTAALGCLVKDYFPEP |
| | | VTVSWNSGALTSGVHTFPAVLQSSGLYSLSSVVTV |
| | | PSSNFGTQTYTCNVDHKPSNTKVDKTVERKCCVEC |
| | | PPCPAPELLAGPSVFLFPPKPKDTLMISRTPEVTCVV |
| | | VDVSHEDPEVKFNWYVDGVEVHNAKTKPREEQY |
| | | NSTYRVVSVLTVLHQDWLNGKEYKCKVSNKALPA |
| | | PIEKTISKAKGQPREPQVYTLPPSREEMTKNQVSLT |
| | | CLVKGFYPSDIAVEWESNGQPENNYKTTPPVLDSD |
| | | GSFFLYSKLTVDKSRWQQGNVFSCSVMHEALHNH |
| | | YTQKSLSLSPGK |
| 400 | IgG2.5G1-AY-GASDALIE | STKGPSVFPLAPSSRSTSESTAALGCLVKDYFPEPVT |
| | | VSWNSGALTSGVHTFPAVLQSSGLYSLSSVVTVPSS |
| | | NFGTQTYTCNVDHKPSNTKVDKTVERKCCVECPP |
| | | CPAPELLAGPDVFLFPPKPKDTLMISRTPEVTCVVV |
| | | DVSHEDPEVKFNWYVDGVEVHNAKTKPREEQYNS |
| | | TYRVVSVLTVLHQDWLNGKEYKCKVSNKALPLPE |
| | | EKTISKAKGQPREPQVYTLPPSREEMTKNQVSLTCL |
| | | VKGFYPSDIAVEWESNGQPENNYKTTPPVLDSDGS |
| | | FFLYSKLTVDKSRWQQGNVFSCSVMHEALHNHYT |
| | | QKSLSLSPGK |
| 401 | IgG2.3G1.1f-AY | ASTKGPSVFPLAPCSRSTSESTAALGCLVKDYFPEP |
| | | VTVSWNSGALTSGVHTFPAVLQSSGLYSLSSVVTV |
| | | PSSNFGTQTYTCNVDHKPSNTKVDKTVERKSCVEC |
| | | PPCPAPEAEGAPSVFLFPPKPKDTLMISRTPEVTCVV |
| | | VDVSHEDPEVKFNWYVDGVEVHNAKTKPREEQY |
| | | NSTYRVVSVLTVLHQDWLNGKEYKCKVSNKALPS |
| | | SIEKTISKAKGQPREPQVYTLPPSREEMTKNQVSLT |
| | | CLVKGFYPSDIAVEWESNGQPENNYKTTPPVLDSD |
| | | GSFFLYSKLTVDKSRWQQGNVFSCSVMHEALHNH |
| | | YTQKSLSLSPGK |
| 402 | IgG2.3G1.3f-AY | ASTKGPSVFPLAPCSRSTSESTAALGCLVKDYFPEP |
| | | VTVSWNSGALTSGVHTFPAVLQSSGLYSLSSVVTV |
| | | PSSNFGTQTYTCNVDHKPSNTKVDKTVERKSCVEC |
| | | PPCPAPEAEGAPSVFLFPPKPKDTLMISRTPEVTCVV |
| | | VDVSHEDPEVKFNWYVDGVEVHNAKTKPREEQY |
| | | NSTYRVVSVLTVLHQDWLNGKEYKCKVSNKALPA |
| | | PIEKTISKAKGQPREPQVYTLPPSREEMTKNQVSLT |
| | | CLVKGFYPSDIAVEWESNGQPENNYKTTPPVLDSD |
| | | GSFFLYSKLTVDKSRWQQGNVFSCSVMHEALHNH |
| | | YTQKSLSLSPGK |
| 403 | IgG2.3G1-AY-D265A | ASTKGPSVFPLAPCSRSTSESTAALGCLVKDYFPEP |
| | | VTVSWNSGALTSGVHTFPAVLQSSGLYSLSSVVTV |
| | | PSSNFGTQTYTCNVDHKPSNTKVDKTVERKSCVEC |
| | | PPCPAPELLGGPSVFLFPPKPKDTLMISRTPEVTCVV |
| | | VAVSHEDPEVKFNWYVDGVEVHNAKTKPREEQY |
| | | NSTYRVVSVLTVLHQDWLNGKEYKCKVSNKALPA |
| | | PIEKTISKAKGQPREPQVYTLPPSREEMTKNQVSLT |
| | | CLVKGFYPSDIAVEWESNGQPENNYKTTPPVLDSD |
| | | GSFFLYSKLTVDKSRWQQGNVFSCSVMHEALHNH |
| | | YTQKSLSLSPGK |
| 404 | IgG2.3G1-AY-N297A | ASTKGPSVFPLAPCSRSTSESTAALGCLVKDYFPEP |
| | | VTVSWNSGALTSGVHTFPAVLQSSGLYSLSSVVTV |
| | | PSSNFGTQTYTCNVDHKPSNTKVDKTVERKSCVEC |
| | | PPCPAPELLGGPSVFLFPPKPKDTLMISRTPEVTCVV |
| | | VDVSHEDPEVKFNWYVDGVEVHNAKTKPREEQY |
| | | ASTYRVVSVLTVLHQDWLNGKEYKCKVSNKALPA |
| | | PIEKTISKAKGQPREPQVYTLPPSREEMTKNQVSLT |
| | | CLVKGFYPSDIAVEWESNGQPENNYKTTPPVLDSD |
| | | GSFFLYSKLTVDKSRWQQGNVFSCSVMHEALHNH |
| | | YTQKSLSLSPGK |
| 405 | IgG2.5G1.1f-AY | ASTKGPSVFPLAPSSRSTSESTAALGCLVKDYFPEP |
| | | VTVSWNSGALTSGVHTFPAVLQSSGLYSLSSVVTV |
| | | PSSNFGTQTYTCNVDHKPSNTKVDKTVERKCCVEC |
| | | PPCPAPEAEGAPSVFLFPPKPKDTLMISRTPEVTCVV |
| | | VDVSHEDPEVKFNWYVDGVEVHNAKTKPREEQY |
| | | NSTYRVVSVLTVLHQDWLNGKEYKCKVSNKALPS |
| | | SIEKTISKAKGQPREPQVYTLPPSREEMTKNQVSLT |
| | | CLVKGFYPSDIAVEWESNGQPENNYKTTPPVLDSD |
| | | GSFFLYSKLTVDKSRWQQGNVFSCSVMHEALHNH |
| | | YTQKSLSLSPGK |
| 406 | IgG2.5G1.3f-AY | ASTKGPSVFPLAPSSRSTSESTAALGCLVKDYFPEP |
| | | VTVSWNSGALTSGVHTFPAVLQSSGLYSLSSVVTV |
| | | PSSNFGTQTYTCNVDHKPSNTKVDKTVERKCCVEC |
| | | PPCPAPEAEGAPSVFLFPPKPKDTLMISRTPEVTCVV |
| | | VDVSHEDPEVKFNWYVDGVEVHNAKTKPREEQY |
| | | NSTYRVVSVLTVLHQDWLNGKEYKCKVSNKALPA |
| | | PIEKTISKAKGQPREPQVYTLPPSREEMTKNQVSLT |
| | | CLVKGFYPSDIAVEWESNGQPENNYKTTPPVLDSD |
| | | GSFFLYSKLTVDKSRWQQGNVFSCSVMHEALHNH |
| | | YTQKSLSLSPGK |
| 407 | IgG2.5G1-AY-D265A | ASTKGPSVFPLAPSSRSTSESTAALGCLVKDYFPEP |
| | | VTVSWNSGALTSGVHTFPAVLQSSGLYSLSSVVTV |
| | | PSSNFGTQTYTCNVDHKPSNTKVDKTVERKCCVEC |
| | | PPCPAPELLGGPSVFLFPPKPKDTLMISRTPEVTCVV |
| | | VAVSHEDPEVKFNWYVDGVEVHNAKTKPREEQY |
| | | NSTYRVVSVLTVLHQDWLNGKEYKCKVSNKALPA |
| | | PIEKTISKAKGQPREPQVYTLPPSREEMTKNQVSLT |
| | | CLVKGFYPSDIAVEWESNGQPENNYKTTPPVLDSD |
| | | GSFFLYSKLTVDKSRWQQGNVFSCSVMHEALHNH |
| | | YTQKSLSLSPGK |
| 408 | IgG2.5G1-AY-N297A | ASTKGPSVFPLAPSSRSTSESTAALGCLVKDYFPEP |
| | | VTVSWNSGALTSGVHTFPAVLQSSGLYSLSSVVTV |
| | | PSSNFGTQTYTCNVDHKPSNTKVDKTVERKCCVEC |
| | | PPCPAPELLGGPSVFLFPPKPKDTLMISRTPEVTCVV |
| | | VDVSHEDPEVKFNWYVDGVEVHNAKTKPREEQY |
| | | ASTYRVVSVLTVLHQDWLNGKEYKCKVSNKALPA |
| | | PIEKTISKAKGQPREPQVYTLPPSREEMTKNQVSLT |
| | | CLVKGFYPSDIAVEWESNGQPENNYKTTPPVLDSD |
| | | GSFFLYSKLTVDKSRWQQGNVFSCSVMHEALHNH |
| | | YTQKSLSLSPGK |
| 409 | CT | ASTKGPSVFPLAPSSKSTSGGTAALGCLVKDYFPEP |
| | | VTVSWNSGALTSGVHTFPAVLQSSGLYSLSSVVTV |
| | | PSSSLGTQTYICNVNHKPSNTKVDKRVEPKSCDKT |
| | | HTSPPSPAPELLGGSSVFLFPPKPKDTLMISRTPEVT |
| | | CVVVDVSHEDPEVKFNWYVDGVEVHNAKTKPRE |
| | | EQYNSTYRVVSVLTVLHQDWLNGKEYKCKVSNK |
| | | ALPAPIEKTISKAKGQPREPQVYTLPPSRDELTKNQ |
| | | VSLTCLVKGFYPSDIAVEWESNGQPENNYKTTPPV |
| | | LDSDGSFFLYSKLTVDKSRWQQGNVFSCSVMHEA |
| | | LHNHYTQKSLSLSPGK |
| 410 | CTf | ASTKGPSVFPLAPSSKSTSGGTAALGCLVKDYFPEP |
| | | VTVSWNSGALTSGVHTFPAVLQSSGLYSLSSVVTV |
| | | PSSSLGTQTYICNVNHKPSNTKVDKRVEPKSCDKT |
| | | HTSPPSPAPELLGGSSVFLFPPKPKDTLMISRTPEVT |
| | | CVVVDVSHEDPEVKFNWYVDGVEVHNAKTKPRE |
| | | EQYNSTYRVVSVLTVLHQDWLNGKEYKCKVSNK |
| | | ALPAPIEKTISKAKGQPREPQVYTLPPSREEMTKNQ |
| | | VSLTCLVKGFYPSDIAVEWESNGQPENNYKTTPPV |
| | | LDSDGSFFLYSKLTVDKSRWQQGNVFSCSVMHEA |
| | | LHNHYTQKSLSLSPGK |
| 411 | IgG2.3-CT | ASTKGPSVFPLAPCSRSTSESTAALGCLVKDYFPEP |
| | | VTVSWNSGALTSGVHTFPAVLQSSGLYSLSSVVTV |
| | | PSSNFGTQTYTCNVDHKPSNTKVDKTVERKSCVES |
| | | PPSPAPELLGGSSVFLFPPKPKDTLMISRTPEVTCVV |
| | | VDVSHEDPEVKFNWYVDGVEVHNAKTKPREEQY |
| | | NSTYRVVSVLTVLHQDWLNGKEYKCKVSNKALPA |
| | | PIEKTISKAKGQPREPQVYTLPPSRDELTKNQVSLT |
| | | CLVKGFYPSDIAVEWESNGQPENNYKTTPPVLDSD |
| | | GSFFLYSKLTVDKSRWQQGNVFSCSVMHEALHNH |
| | | YTQKSLSLSPGK |
| 412 | IgG2.5-CT | ASTKGPSVFPLAPSSRSTSESTAALGCLVKDYFPEP |
| | | VTVSWNSGALTSGVHTFPAVLQSSGLYSLSSVVTV |
| | | PSSNFGTQTYTCNVDHKPSNTKVDKTVERKCCVES |
| | | PPSPAPELLGGSSVFLFPPKPKDTLMISRTPEVTCVV |
| | | VDVSHEDPEVKFNWYVDGVEVHNAKTKPREEQY |
| | | NSTYRVVSVLTVLHQDWLNGKEYKCKVSNKALPA |
| | | PIEKTISKAKGQPREPQVYTLPPSRDELTKNQVSLT |
| | | CLVKGFYPSDIAVEWESNGQPENNYKTTPPVLDSD |
| | | GSFFLYSKLTVDKSRWQQGNVFSCSVMHEALHNH |
| | | YTQKSLSLSPGK |
| 413 | IgG1fa-C226S | ASTKGPSVFPLAPSSKSTSGGTAALGCLVKDYFPEP |
| | | VTVSWNSGALTSGVHTFPAVLQSSGLYSLSSVVTV |
| | | PSSSLGTQTYICNVNHKPSNTKVDKRVEPKSCDKT |
| | | HTSPPCPAPELLGGPSVFLFPPKPKDTLMISRTPEVT |
| | | CVVVDVSHEDPEVKFNWYVDGVEVHNAKTKPRE |
| | | EQYNSTYRVVSVLTVLHQDWLNGKEYKCKVSNK |
| | | ALPAPIEKTISKAKGQPREPQVYTLPPSRDELTKNQ |
| | | VSLTCLVKGFYPSDIAVEWESNGQPENNYKTTPPV |
| | | LDSDGSFFLYSKLTVDKSRWQQGNVFSCSVMHEA |
| | | LHNHYTQKSLSLSPGK |
| 414 | IgG1fa-C229S | ASTKGPSVFPLAPSSKSTSGGTAALGCLVKDYFPEP |
| | | VTVSWNSGALTSGVHTFPAVLQSSGLYSLSSVVTV |
| | | PSSSLGTQTYICNVNHKPSNTKVDKRVEPKSCDKT |
| | | HTCPPSPAPELLGGPSVFLFPPKPKDTLMISRTPEVT |
| | | CVVVDVSHEDPEVKFNWYVDGVEVHNAKTKPRE |
| | | EQYNSTYRVVSVLTVLHQDWLNGKEYKCKVSNK |
| | | ALPAPIEKTISKAKGQPREPQVYTLPPSRDELTKNQ |
| | | VSLTCLVKGFYPSDIAVEWESNGQPENNYKTTPPV |
| | | LDSDGSFFLYSKLTVDKSRWQQGNVFSCSVMHEA |
| | | LHNHYTQKSLSLSPGK |
| 415 | IgG1fa-C226S, C229S | ASTKGPSVFPLAPSSKSTSGGTAALGCLVKDYFPEP |
| | | VTVSWNSGALTSGVHTFPAVLQSSGLYSLSSVVTV |
| | | PSSSLGTQTYICNVNHKPSNTKVDKRVEPKSCDKT |
| | | HTSPPSPAPELLGGPSVFLFPPKPKDTLMISRTPEVT |
| | | CVVVDVSHEDPEVKFNWYVDGVEVHNAKTKPRE |
| | | EQYNSTYRVVSVLTVLHQDWLNGKEYKCKVSNK |
| | | ALPAPIEKTISKAKGQPREPQVYTLPPSRDELTKNQ |
| | | VSLTCLVKGFYPSDIAVEWESNGQPENNYKTTPPV |
| | | LDSDGSFFLYSKLTVDKSRWQQGNVFSCSVMHEA |
| | | LHNHYTQKSLSLSPGK |
| 416 | IgG1fa-P238S | ASTKGPSVFPLAPSSKSTSGGTAALGCLVKDYFPEP |
| | | VTVSWNSGALTSGVHTFPAVLQSSGLYSLSSVVTV |
| | | PSSSLGTQTYICNVNHKPSNTKVDKRVEPKSCDKT |
| | | HTCPPCPAPELLGGSSVFLFPPKPKDTLMISRTPEVT |
| | | CVVVDVSHEDPEVKFNWYVDGVEVHNAKTKPRE |
| | | EQYNSTYRVVSVLTVLHQDWLNGKEYKCKVSNK |
| | | ALPAPIEKTISKAKGQPREPQVYTLPPSRDELTKNQ |
| | | VSLTCLVKGFYPSDIAVEWESNGQPENNYKTTPPV |
| | | LDSDGSFFLYSKLTVDKSRWQQGNVFSCSVMHEA |
| | | LHNHYTQKSLSLSPGK |
| 417 | IgG1fa-C226A | ASTKGPSVFPLAPSSKSTSGGTAALGCLVKDYFPEP |
| | | VTVSWNSGALTSGVHTFPAVLQSSGLYSLSSVVTV |
| | | PSSSLGTQTYICNVNHKPSNTKVDKRVEPKSCDKT |
| | | HTAPPCPAPELLGGPSVFLFPPKPKDTLMISRTPEVT |
| | | CVVVDVSHEDPEVKFNWYVDGVEVHNAKTKPRE |
| | | EQYNSTYRVVSVLTVLHQDWLNGKEYKCKVSNK |
| | | ALPAPIEKTISKAKGQPREPQVYTLPPSRDELTKNQ |
| | | VSLTCLVKGFYPSDIAVEWESNGQPENNYKTTPPV |
| | | LDSDGSFFLYSKLTVDKSRWQQGNVFSCSVMHEA |
| | | LHNHYTQKSLSLSPGK |
| 418 | IgG1fa-C229A | ASTKGPSVFPLAPSSKSTSGGTAALGCLVKDYFPEP |
| | | VTVSWNSGALTSGVHTFPAVLQSSGLYSLSSVVTV |
| | | PSSSLGTQTYICNVNHKPSNTKVDKRVEPKSCDKT |
| | | HTCPPAPAPELLGGPSVFLFPPKPKDTLMISRTPEVT |
| | | CVVVDVSHEDPEVKFNWYVDGVEVHNAKTKPRE |
| | | EQYNSTYRVVSVLTVLHQDWLNGKEYKCKVSNK |
| | | ALPAPIEKTISKAKGQPREPQVYTLPPSRDELTKNQ |
| | | VSLTCLVKGFYPSDIAVEWESNGQPENNYKTTPPV |
| | | LDSDGSFFLYSKLTVDKSRWQQGNVFSCSVMHEA |
| | | LHNHYTQKSLSLSPGK |
| 419 | IgG1fa-C226A, C229A | ASTKGPSVFPLAPSSKSTSGGTAALGCLVKDYFPEP |
| | | VTVSWNSGALTSGVHTFPAVLQSSGLYSLSSVVTV |
| | | PSSSLGTQTYICNVNHKPSNTKVDKRVEPKSCDKT |
| | | HTAPPAPAPELLGGPSVFLFPPKPKDTLMISRTPEVT |
| | | CVVVDVSHEDPEVKFNWYVDGVEVHNAKTKPRE |
| | | EQYNSTYRVVSVLTVLHQDWLNGKEYKCKVSNK |
| | | ALPAPIEKTISKAKGQPREPQVYTLPPSRDELTKNQ |
| | | VSLTCLVKGFYPSDIAVEWESNGQPENNYKTTPPV |
| | | LDSDGSFFLYSKLTVDKSRWQQGNVFSCSVMHEA |
| | | LHNHYTQKSLSLSPGK |
| 420 | IgG1fa-P238K | ASTKGPSVFPLAPSSKSTSGGTAALGCLVKDYFPEP |
| | | VTVSWNSGALTSGVHTFPAVLQSSGLYSLSSVVTV |
| | | PSSSLGTQTYICNVNHKPSNTKVDKRVEPKSCDKT |
| | | HTCPPCPAPELLGGKSVFLFPPKPKDTLMISRTPEVT |
| | | CVVVDVSHEDPEVKFNWYVDGVEVHNAKTKPRE |
| | | EQYNSTYRVVSVLTVLHQDWLNGKEYKCKVSNK |
| | | ALPAPIEKTISKAKGQPREPQVYTLPPSRDELTKNQ |
| | | VSLTCLVKGFYPSDIAVEWESNGQPENNYKTTPPV |
| | | LDSDGSFFLYSKLTVDKSRWQQGNVFSCSVMHEA |
| | | LHNHYTQKSLSLSPGK |
| 421 | IgG2.3-R133K | ASTKGPSVFPLAPCSKSTSESTAALGCLVKDYFPEP |
| | | VTVSWNSGALTSGVHTFPAVLQSSGLYSLSSVVTV |
| | | PSSNFGTQTYTCNVDHKPSNTKVDKTVERKSCVEC |
| | | PPCPAPPVAGPSVFLFPPKPKDTLMISRTPEVTCVV |
| | | VDVSHEDPEVQFNWYVDGVEVHNAKTKPREEQFN |
| | | STFRVVSVLTVVHQDWLNGKEYKCKVSNKGLPAP |
| | | IEKTISKTKGQPREPQVYTLPPSREEMTKNQVSLTC |
| | | LVKGFYPSDIAVEWESNGQPENNYKTTPPMLDSDG |
| | | SFFLYSKLTVDKSRWQQGNVFSCSVMHEALHNHY |
| | | TQKSLSLSPGK |
| 422 | IgG2.3-E137G | ASTKGPSVFPLAPCSRSTSGSTAALGCLVKDYFPEP |
| | | VTVSWNSGALTSGVHTFPAVLQSSGLYSLSSVVTV |
| | | PSSNFGTQTYTCNVDHKPSNTKVDKTVERKSCVEC |
| | | PPCPAPPVAGPSVFLFPPKPKDTLMISRTPEVTCVV |
| | | VDVSHEDPEVQFNWYVDGVEVHNAKTKPREEQFN |
| | | STFRVVSVLTVVHQDWLNGKEYKCKVSNKGLPAP |
| | | IEKTISKTKGQPREPQVYTLPPSREEMTKNQVSLTC |
| | | LVKGFYPSDIAVEWESNGQPENNYKTTPPMLDSDG |
| | | SFFLYSKLTVDKSRWQQGNVFSCSVMHEALHNHY |
| | | TQKSLSLSPGK |
| 423 | IgG2.3-S138G | ASTKGPSVFPLAPCSRSTSEGTAALGCLVKDYFPEP |
| | | VTVSWNSGALTSGVHTFPAVLQSSGLYSLSSVVTV |
| | | PSSNFGTQTYTCNVDHKPSNTKVDKTVERKSCVEC |
| | | PPCPAPPVAGPSVFLFPPKPKDTLMISRTPEVTCVV |
| | | VDVSHEDPEVQFNWYVDGVEVHNAKTKPREEQFN |
| | | STFRVVSVLTVVHQDWLNGKEYKCKVSNKGLPAP |
| | | IEKTISKTKGQPREPQVYTLPPSREEMTKNQVSLTC |
| | | LVKGFYPSDIAVEWESNGQPENNYKTTPPMLDSDG |
| | | SFFLYSKLTVDKSRWQQGNVFSCSVMHEALHNHY |
| | | TQKSLSLSPGK |
| 424 | IgG2.3-E137G-S138G | ASTKGPSVFPLAPCSRSTSGGTAALGCLVKDYFPEP |
| | | VTVSWNSGALTSGVHTFPAVLQSSGLYSLSSVVTV |
| | | PSSNFGTQTYTCNVDHKPSNTKVDKTVERKSCVEC |
| | | PPCPAPPVAGPSVFLFPPKPKDTLMISRTPEVTCVV |
| | | VDVSHEDPEVQFNWYVDGVEVHNAKTKPREEQFN |
| | | STFRVVSVLTVVHQDWLNGKEYKCKVSNKGLPAP |
| | | IEKTISKTKGQPREPQVYTLPPSREEMTKNQVSLTC |
| | | LVKGFYPSDIAVEWESNGQPENNYKTTPPMLDSDG |
| | | SFFLYSKLTVDKSRWQQGNVFSCSVMHEALHNHY |
| | | TQKSLSLSPGK |
| 425 | IgG2.3-T214R | ASTKGPSVFPLAPCSRSTSESTAALGCLVKDYFPEP |
| | | VTVSWNSGALTSGVHTFPAVLQSSGLYSLSSVVTV |
| | | PSSNFGTQTYTCNVDHKPSNTKVDKRVERKSCVEC |
| | | PPCPAPPVAGPSVFLFPPKPKDTLMISRTPEVTCVV |
| | | VDVSHEDPEVQFNWYVDGVEVHNAKTKPREEQFN |
| | | STFRVVSVLTVVHQDWLNGKEYKCKVSNKGLPAP |
| | | IEKTISKTKGQPREPQVYTLPPSREEMTKNQVSLTC |
| | | LVKGFYPSDIAVEWESNGQPENNYKTTPPMLDSDG |
| | | SFFLYSKLTVDKSRWQQGNVFSCSVMHEALHNHY |
| | | TQKSLSLSPGK |
| 426 | IgG2.3-R217P | ASTKGPSVFPLAPCSRSTSESTAALGCLVKDYFPEP |
| | | VTVSWNSGALTSGVHTFPAVLQSSGLYSLSSVVTV |
| | | PSSNFGTQTYTCNVDHKPSNTKVDKTVEPKSCVEC |
| | | PPCPAPPVAGPSVFLFPPKPKDTLMISRTPEVTCVV |
| | | VDVSHEDPEVQFNWYVDGVEVHNAKTKPREEQFN |
| | | STFRVVSVLTVVHQDWLNGKEYKCKVSNKGLPAP |
| | | IEKTISKTKGQPREPQVYTLPPSREEMTKNQVSLTC |
| | | LVKGFYPSDIAVEWESNGQPENNYKTTPPMLDSDG |
| | | SFFLYSKLTVDKSRWQQGNVFSCSVMHEALHNHY |
| | | TQKSLSLSPGK |
| 427 | IgG2.3-R217S | ASTKGPSVFPLAPCSRSTSESTAALGCLVKDYFPEP |
| | | VTVSWNSGALTSGVHTFPAVLQSSGLYSLSSVVTV |
| | | PSSNFGTQTYTCNVDHKPSNTKVDKTVESKSCVEC |
| | | PPCPAPPVAGPSVFLFPPKPKDTLMISRTPEVTCVV |
| | | VDVSHEDPEVQFNWYVDGVEVHNAKTKPREEQFN |
| | | STFRVVSVLTVVHQDWLNGKEYKCKVSNKGLPAP |
| | | IEKTISKTKGQPREPQVYTLPPSREEMTKNQVSLTC |
| | | LVKGFYPSDIAVEWESNGQPENNYKTTPPMLDSDG |
| | | SFFLYSKLTVDKSRWQQGNVFSCSVMHEALHNHY |
| | | TQKSLSLSPGK |
| 428 | IgG2.3-V224A | ASTKGPSVFPLAPCSRSTSESTAALGCLVKDYFPEP |
| | | VTVSWNSGALTSGVHTFPAVLQSSGLYSLSSVVTV |
| | | PSSNFGTQTYTCNVDHKPSNTKVDKTVERKSCAEC |
| | | PPCPAPPVAGPSVFLFPPKPKDTLMISRTPEVTCVV |
| | | VDVSHEDPEVQFNWYVDGVEVHNAKTKPREEQFN |
| | | STFRVVSVLTVVHQDWLNGKEYKCKVSNKGLPAP |
| | | IEKTISKTKGQPREPQVYTLPPSREEMTKNQVSLTC |
| | | LVKGFYPSDIAVEWESNGQPENNYKTTPPMLDSDG |
| | | SFFLYSKLTVDKSRWQQGNVFSCSVMHEALHNHY |
| | | TQKSLSLSPGK |
| 429 | IgG2.3-E225A | ASTKGPSVFPLAPCSRSTSESTAALGCLVKDYFPEP |
| | | VTVSWNSGALTSGVHTFPAVLQSSGLYSLSSVVTV |
| | | PSSNFGTQTYTCNVDHKPSNTKVDKTVERKSCVAC |
| | | PPCPAPPVAGPSVFLFPPKPKDTLMISRTPEVTCVV |
| | | VDVSHEDPEVQFNWYVDGVEVHNAKTKPREEQFN |
| | | STFRVVSVLTVVHQDWLNGKEYKCKVSNKGLPAP |
| | | IEKTISKTKGQPREPQVYTLPPSREEMTKNQVSLTC |
| | | LVKGFYPSDIAVEWESNGQPENNYKTTPPMLDSDG |
| | | SFFLYSKLTVDKSRWQQGNVFSCSVMHEALHNHY |
| | | TQKSLSLSPGK |
| 430 | IgG2.3-R133A | ASTKGPSVFPLAPCSASTSESTAALGCLVKDYFPEP |
| | | VTVSWNSGALTSGVHTFPAVLQSSGLYSLSSVVTV |
| | | PSSNFGTQTYTCNVDHKPSNTKVDKTVERKSCVEC |
| | | PPCPAPPVAGPSVFLFPPKPKDTLMISRTPEVTCVV |
| | | VDVSHEDPEVQFNWYVDGVEVHNAKTKPREEQFN |
| | | STFRVVSVLTVVHQDWLNGKEYKCKVSNKGLPAP |
| | | IEKTISKTKGQPREPQVYTLPPSREEMTKNQVSLTC |
| | | LVKGFYPSDIAVEWESNGQPENNYKTTPPMLDSDG |
| | | SFFLYSKLTVDKSRWQQGNVFSCSVMHEALHNHY |
| | | TQKSLSLSPGK |
| 431 | IgG2.3-E137D | ASTKGPSVFPLAPCSRSTSDSTAALGCLVKDYFPEP |
| | | VTVSWNSGALTSGVHTFPAVLQSSGLYSLSSVVTV |
| | | PSSNFGTQTYTCNVDHKPSNTKVDKTVERKSCVEC |
| | | PPCPAPPVAGPSVFLFPPKPKDTLMISRTPEVTCVV |
| | | VDVSHEDPEVQFNWYVDGVEVHNAKTKPREEQFN |
| | | STFRVVSVLTVVHQDWLNGKEYKCKVSNKGLPAP |
| | | IEKTISKTKGQPREPQVYTLPPSREEMTKNQVSLTC |
| | | LVKGFYPSDIAVEWESNGQPENNYKTTPPMLDSDG |
| | | SFFLYSKLTVDKSRWQQGNVFSCSVMHEALHNHY |
| | | TQKSLSLSPGK |
| 432 | IgG2.3-E137Q | ASTKGPSVFPLAPCSRSTSQSTAALGCLVKDYFPEP |
| | | VTVSWNSGALTSGVHTFPAVLQSSGLYSLSSVVTV |
| | | PSSNFGTQTYTCNVDHKPSNTKVDKTVERKSCVEC |
| | | PPCPAPPVAGPSVFLFPPKPKDTLMISRTPEVTCVV |
| | | VDVSHEDPEVQFNWYVDGVEVHNAKTKPREEQFN |
| | | STFRVVSVLTVVHQDWLNGKEYKCKVSNKGLPAP |
| | | IEKTISKTKGQPREPQVYTLPPSREEMTKNQVSLTC |
| | | LVKGFYPSDIAVEWESNGQPENNYKTTPPMLDSDG |
| | | SFFLYSKLTVDKSRWQQGNVFSCSVMHEALHNHY |
| | | TQKSLSLSPGK |
| 433 | IgG2.3-S138T | ASTKGPSVFPLAPCSRSTSETTAALGCLVKDYFPEP |
| | | VTVSWNSGALTSGVHTFPAVLQSSGLYSLSSVVTV |
| | | PSSNFGTQTYTCNVDHKPSNTKVDKTVERKSCVEC |
| | | PPCPAPPVAGPSVFLFPPKPKDTLMISRTPEVTCVV |
| | | VDVSHEDPEVQFNWYVDGVEVHNAKTKPREEQFN |
| | | STFRVVSVLTVVHQDWLNGKEYKCKVSNKGLPAP |
| | | IEKTISKTKGQPREPQVYTLPPSREEMTKNQVSLTC |
| | | LVKGFYPSDIAVEWESNGQPENNYKTTPPMLDSDG |
| | | SFFLYSKLTVDKSRWQQGNVFSCSVMHEALHNHY |
| | | TQKSLSLSPGK |
| 434 | IgG2.3-S138E | ASTKGPSVFPLAPCSRSTSEETAALGCLVKDYFPEP |
| | | VTVSWNSGALTSGVHTFPAVLQSSGLYSLSSVVTV |
| | | PSSNFGTQTYTCNVDHKPSNTKVDKTVERKSCVEC |
| | | PPCPAPPVAGPSVFLFPPKPKDTLMISRTPEVTCVV |
| | | VDVSHEDPEVQFNWYVDGVEVHNAKTKPREEQFN |
| | | STFRVVSVLTVVHQDWLNGKEYKCKVSNKGLPAP |
| | | IEKTISKTKGQPREPQVYTLPPSREEMTKNQVSLTC |
| | | LVKGFYPSDIAVEWESNGQPENNYKTTPPMLDSDG |
| | | SFFLYSKLTVDKSRWQQGNVFSCSVMHEALHNHY |
| | | TQKSLSLSPGK |
| 435 | IgG2 .3-El 37A-S1381 | ASTKGPSVFPLAPCSRSTSAITAALGCLVKDYFPEP |
| | | VTVSWNSGALTSGVHTFPAVLQSSGLYSLSSVVTV |
| | | PSSNFGTQTYTCNVDHKPSNTKVDKTVERKSCVEC |
| | | PPCPAPPVAGPSVFLFPPKPKDTLMISRTPEVTCVV |
| | | VDVSHEDPEVQFNWYVDGVEVHNAKTKPREEQFN |
| | | STFRVVSVLTVVHQDWLNGKEYKCKVSNKGLPAP |
| | | IEKTISKTKGQPREPQVYTLPPSREEMTKNQVSLTC |
| | | LVKGFYPSDIAVEWESNGQPENNYKTTPPMLDSDG |
| | | SFFLYSKLTVDKSRWQQGNVFSCSVMHEALHNHY |
| | | TQKSLSLSPGK |
| 436 | IgG2.3-E137I-S138A | ASTKGPSVFPLAPCSRSTSIATAALGCLVKDYFPEP |
| | | VTVSWNSGALTSGVHTFPAVLQSSGLYSLSSVVTV |
| | | PSSNFGTQTYTCNVDHKPSNTKVDKTVERKSCVEC |
| | | PPCPAPPVAGPSVFLFPPKPKDTLMISRTPEVTCVV |
| | | VDVSHEDPEVQFNWYVDGVEVHNAKTKPREEQFN |
| | | STFRVVSVLTVVHQDWLNGKEYKCKVSNKGLPAP |
| | | IEKTISKTKGQPREPQVYTLPPSREEMTKNQVSLTC |
| | | LVKGFYPSDIAVEWESNGQPENNYKTTPPMLDSDG |
| | | SFFLYSKLTVDKSRWQQGNVFSCSVMHEALHNHY |
| | | TQKSLSLSPGK |
| 437 | IgG2.3-R217G | ASTKGPSVFPLAPCSRSTSESTAALGCLVKDYFPEP |
| | | VTVSWNSGALTSGVHTFPAVLQSSGLYSLSSVVTV |
| | | PSSNFGTQTYTCNVDHKPSNTKVDKTVEGKSCVEC |
| | | PPCPAPPVAGPSVFLFPPKPKDTLMISRTPEVTCVV |
| | | VDVSHEDPEVQFNWYVDGVEVHNAKTKPREEQFN |
| | | STFRVVSVLTVVHQDWLNGKEYKCKVSNKGLPAP |
| | | IEKTISKTKGQPREPQVYTLPPSREEMTKNQVSLTC |
| | | LVKGFYPSDIAVEWESNGQPENNYKTTPPMLDSDG |
| | | SFFLYSKLTVDKSRWQQGNVFSCSVMHEALHNHY |
| | | TQKSLSLSPGK |
| 438 | IgG2.3-R217A | ASTKGPSVFPLAPCSRSTSESTAALGCLVKDYFPEP |
| | | VTVSWNSGALTSGVHTFPAVLQSSGLYSLSSVVTV |
| | | PSSNFGTQTYTCNVDHKPSNTKVDKTVEAKSCVEC |
| | | PPCPAPPVAGPSVFLFPPKPKDTLMISRTPEVTCVV |
| | | VDVSHEDPEVQFNWYVDGVEVHNAKTKPREEQFN |
| | | STFRVVSVLTVVHQDWLNGKEYKCKVSNKGLPAP |
| | | IEKTISKTKGQPREPQVYTLPPSREEMTKNQVSLTC |
| | | LVKGFYPSDIAVEWESNGQPENNYKTTPPMLDSDG |
| | | SFFLYSKLTVDKSRWQQGNVFSCSVMHEALHNHY |
| | | TQKSLSLSPGK |
| 439 | IgG2.3-R2171 | ASTKGPSVFPLAPCSRSTSESTAALGCLVKDYFPEP |
| | | VTVSWNSGALTSGVHTFPAVLQSSGLYSLSSVVTV |
| | | PSSNFGTQTYTCNVDHKPSNTKVDKTVEIKSCVEC |
| | | PPCPAPPVAGPSVFLFPPKPKDTLMISRTPEVTCVV |
| | | VDVSHEDPEVQFNWYVDGVEVHNAKTKPREEQFN |
| | | STFRVVSVLTVVHQDWLNGKEYKCKVSNKGLPAP |
| | | IEKTISKTKGQPREPQVYTLPPSREEMTKNQVSLTC |
| | | LVKGFYPSDIAVEWESNGQPENNYKTTPPMLDSDG |
| | | SFFLYSKLTVDKSRWQQGNVFSCSVMHEALHNHY |
| | | TQKSLSLSPGK |
| 440 | IgG2.3-R217E | ASTKGPSVFPLAPCSRSTSESTAALGCLVKDYFPEP |
| | | VTVSWNSGALTSGVHTFPAVLQSSGLYSLSSVVTV |
| | | PSSNFGTQTYTCNVDHKPSNTKVDKTVEEKSCVEC |
| | | PPCPAPPVAGPSVFLFPPKPKDTLMISRTPEVTCVV |
| | | VDVSHEDPEVQFNWYVDGVEVHNAKTKPREEQFN |
| | | STFRVVSVLTVVHQDWLNGKEYKCKVSNKGLPAP |
| | | IEKTISKTKGQPREPQVYTLPPSREEMTKNQVSLTC |
| | | LVKGFYPSDIAVEWESNGQPENNYKTTPPMLDSDG |
| | | SFFLYSKLTVDKSRWQQGNVFSCSVMHEALHNHY |
| | | TQKSLSLSPGK |
| 441 | IgG2.3-R217K | ASTKGPSVFPLAPCSRSTSESTAALGCLVKDYFPEP |
| | | VTVSWNSGALTSGVHTFPAVLQSSGLYSLSSVVTV |
| | | PSSNFGTQTYTCNVDHKPSNTKVDKTVEKKSCVEC |
| | | PPCPAPPVAGPSVFLFPPKPKDTLMISRTPEVTCVV |
| | | VDVSHEDPEVQFNWYVDGVEVHNAKTKPREEQFN |
| | | STFRVVSVLTVVHQDWLNGKEYKCKVSNKGLPAP |
| | | IEKTISKTKGQPREPQVYTLPPSREEMTKNQVSLTC |
| | | LVKGFYPSDIAVEWESNGQPENNYKTTPPMLDSDG |
| | | SFFLYSKLTVDKSRWQQGNVFSCSVMHEALHNHY |
| | | TQKSLSLSPGK |
| 442 | IgG2.3-V224I | ASTKGPSVFPLAPCSRSTSESTAALGCLVKDYFPEP |
| | | VTVSWNSGALTSGVHTFPAVLQSSGLYSLSSVVTV |
| | | PSSNFGTQTYTCNVDHKPSNTKVDKTVERKSCIECP |
| | | PCPAPPVAGPSVFLFPPKPKDTLMISRTPEVTCVVV |
| | | DVSHEDPEVQFNWYVDGVEVHNAKTKPREEQFNS |
| | | TFRVVSVLTVVHQDWLNGKEYKCKVSNKGLPAPI |
| | | EKTISKTKGQPREPQVYTLPPSREEMTKNQVSLTCL |
| | | VKGFYPSDIAVEWESNGQPENNYKTTPPMLDSDGS |
| | | FFLYSKLTVDKSRWQQGNVFSCSVMHEALHNHYT |
| | | QKSLSLSPGK |
| 443 | IgG2.3-E225D | ASTKGPSVFPLAPCSRSTSESTAALGCLVKDYFPEP |
| | | VTVSWNSGALTSGVHTFPAVLQSSGLYSLSSVVTV |
| | | PSSNFGTQTYTCNVDHKPSNTKVDKTVERKSCVDC |
| | | PPCPAPPVAGPSVFLFPPKPKDTLMISRTPEVTCVV |
| | | VDVSHEDPEVQFNWYVDGVEVHNAKTKPREEQFN |
| | | STFRVVSVLTVVHQDWLNGKEYKCKVSNKGLPAP |
| | | IEKTISKTKGQPREPQVYTLPPSREEMTKNQVSLTC |
| | | LVKGFYPSDIAVEWESNGQPENNYKTTPPMLDSDG |
| | | SFFLYSKLTVDKSRWQQGNVFSCSVMHEALHNHY |
| | | TQKSLSLSPGK |
| 444 | IgG2-G4.1-G4-G4 | ASTKGPSVFPLAPCSRSTSESTAALGCLVKDYFPEP |
| | | VTVSWNSGALTSGVHTFPAVLQSSGLYSLSSVVTV |
| | | PSSNFGTQTYTCNVDHKPSNTKVDKTVERKYGPPC |
| | | PPCPAPEFLGGPSVFLFPPKPKDTLMISRTPEVTCVV |
| | | VDVSQEDPEVQFNWYVDGVEVHNAKTKPREEQFN |
| | | STYRVVSVLTVLHQDWLNGKEYKCKVSNKGLPSSI |
| | | EKTISKAKGQPREPQVYTLPPSQEEMTKNQVSLTCL |
| | | VKGFYPSDIAVEWESNGQPENNYKTTPPVLDSDGS |
| | | FFLYSRLTVDKSRWQEGNVFSCSVMHEALHNHYT |
| | | QKSLSLSLGK |
| 445 | IgG4-G2.3-G2-G2 | ASTKGPSVFPLAPCSRSTSESTAALGCLVKDYFPEP |
| | | VTVSWNSGALTSGVHTFPAVLQSSGLYSLSSVVTV |
| | | PSSSLGTKTYTCNVDHKPSNTKVDKRVESKSCVEC |
| | | PPCPAPPVAGPSVFLFPPKPKDTLMISRTPEVTCVV |
| | | VDVSHEDPEVQFNWYVDGVEVHNAKTKPREEQFN |
| | | STFRVVSVLTVVHQDWLNGKEYKCKVSNKGLPAP |
| | | IEKTISKTKGQPREPQVYTLPPSREEMTKNQVSLTC |
| | | LVKGFYPSDIAVEWESNGQPENNYKTTPPMLDSDG |
| | | SFFLYSKLTVDKSRWQQGNVFSCSVMHEALHNHY |
| | | TQKSLSLSPGK |
| 446 | IgG2-G4.1-G2-G2 | ASTKGPSVFPLAPCSRSTSESTAALGCLVKDYFPEP |
| | | VTVSWNSGALTSGVHTFPAVLQSSGLYSLSSVVTV |
| | | PSSNFGTQTYTCNVDHKPSNTKVDKTVERKYGPPC |
| | | PPCPAPEFLGGPSVFLFPPKPKDTLMISRTPEVTCVV |
| | | VDVSHEDPEVQFNWYVDGVEVHNAKTKPREEQFN |
| | | STFRVVSVLTVVHQDWLNGKEYKCKVSNKGLPAP |
| | | IEKTISKTKGQPREPQVYTLPPSREEMTKNQVSLTC |
| | | LVKGFYPSDIAVEWESNGQPENNYKTTPPMLDSDG |
| | | SFFLYSKLTVDKSRWQQGNVFSCSVMHEALHNHY |
| | | TQKSLSLSPGK |
| 447 | IgG4-G2.3-G4-G4 | ASTKGPSVFPLAPCSRSTSESTAALGCLVKDYFPEP |
| | | VTVSWNSGALTSGVHTFPAVLQSSGLYSLSSVVTV |
| | | PSSSLGTKTYTCNVDHKPSNTKVDKRVESKSCVEC |
| | | PPCPAPPVAGPSVFLFPPKPKDTLMISRTPEVTCVV |
| | | VDVSQEDPEVQFNWYVDGVEVHNAKTKPREEQFN |
| | | STYRVVSVLTVLHQDWLNGKEYKCKVSNKGLPSSI |
| | | EKTISKAKGQPREPQVYTLPPSQEEMTKNQVSLTCL |
| | | VKGFYPSDIAVEWESNGQPENNYKTTPPVLDSDGS |
| | | FFLYSRLTVDKSRWQEGNVFSCSVMHEALHNHYT |
| | | QKSLSLSLGK |
| 448 | IgG2-G2.3-G4-G4 | ASTKGPSVFPLAPCSRSTSESTAALGCLVKDYFPEP |
| | | VTVSWNSGALTSGVHTFPAVLQSSGLYSLSSVVTV |
| | | PSSNFGTQTYTCNVDHKPSNTKVDKTVERKSCVEC |
| | | PPCPAPPVAGPSVFLFPPKPKDTLMISRTPEVTCVV |
| | | VDVSQEDPEVQFNWYVDGVEVHNAKTKPREEQFN |
| | | STYRVVSVLTVLHQDWLNGKEYKCKVSNKGLPSSI |
| | | EKTISKAKGQPREPQVYTLPPSQEEMTKNQVSLTCL |
| | | VKGFYPSDIAVEWESNGQPENNYKTTPPVLDSDGS |
| | | FFLYSRLTVDKSRWQEGNVFSCSVMHEALHNHYT |
| | | QKSLSLSLGK |
| 449 | IgG4-G4.1-G2-G2 | ASTKGPSVFPLAPCSRSTSESTAALGCLVKDYFPEP |
| | | VTVSWNSGALTSGVHTFPAVLQSSGLYSLSSVVTV |
| | | PSSSLGTKTYTCNVDHKPSNTKVDKRVESKYGPPC |
| | | PPCPAPEFLGGPSVFLFPPKPKDTLMISRTPEVTCVV |
| | | VDVSHEDPEVQFNWYVDGVEVHNAKTKPREEQFN |
| | | STFRVVSVLTVVHQDWLNGKEYKCKVSNKGLPAP |
| | | IEKTISKTKGQPREPQVYTLPPSREEMTKNQVSLTC |
| | | LVKGFYPSDIAVEWESNGQPENNYKTTPPMLDSDG |
| | | SFFLYSKLTVDKSRWQQGNVFSCSVMHEALHNHY |
| | | TQKSLSLSPGK |
| 450 | IgG4-G4.1-G1-G1 | ASTKGPSVFPLAPCSRSTSESTAALGCLVKDYFPEP |
| | | VTVSWNSGALTSGVHTFPAVLQSSGLYSLSSVVTV |
| | | PSSSLGTKTYTCNVDHKPSNTKVDKRVESKYGPPC |
| | | PPCPAPEFLGGPSVFLFPPKPKDTLMISRTPEVTCVV |
| | | VDVSHEDPEVKFNWYVDGVEVHNAKTKPREEQY |
| | | NSTYRVVSVLTVLHQDWLNGKEYKCKVSNKALPA |
| | | PIEKTISKAKGQPREPQVYTLPPSREEMTKNQVSLT |
| | | CLVKGFYPSDIAVEWESNGQPENNYKTTPPVLDSD |
| | | GSFFLYSKLTVDKSRWQQGNVFSCSVMHEALHNH |
| | | YTQKSLSLSPGK |
| 451 | IgG4.1 | ASTKGPSVFPLAPCSRSTSESTAALGCLVKDYFPEP |
| | | VTVSWNSGALTSGVHTFPAVLQSSGLYSLSSVVTV |
| | | PSSSLGTKTYTCNVDHKPSNTKVDKRVESKYGPPC |
| | | PPCPAPEFLGGPSVFLFPPKPKDTLMISRTPEVTCVV |
| | | VDVSQEDPEVQFNWYVDGVEVHNAKTKPREEQFN |
| | | STYRVVSVLTVLHQDWLNGKEYKCKVSNKGLPSSI |
| | | EKTISKAKGQPREPQVYTLPPSQEEMTKNQVSLTCL |
| | | VKGFYPSDIAVEWESNGQPENNYKTTPPVLDSDGS |
| | | FFLYSRLTVDKSRWQEGNVFSCSVMHEALHNHYT |
| | | QKSLSLSLGK |
| 452 | IgG4.1-R214T | ASTKGPSVFPLAPCSRSTSESTAALGCLVKDYFPEP |
| | | VTVSWNSGALTSGVHTFPAVLQSSGLYSLSSVVTV |
| | | PSSSLGTKTYTCNVDHKPSNTKVDKTVESKYGPPC |
| | | PPCPAPEFLGGPSVFLFPPKPKDTLMISRTPEVTCVV |
| | | VDVSQEDPEVQFNWYVDGVEVHNAKTKPREEQFN |
| | | STYRVVSVLTVLHQDWLNGKEYKCKVSNKGLPSSI |
| | | EKTISKAKGQPREPQVYTLPPSQEEMTKNQVSLTCL |
| | | VKGFYPSDIAVEWESNGQPENNYKTTPPVLDSDGS |
| | | FFLYSRLTVDKSRWQEGNVFSCSVMHEALHNHYT |
| | | QKSLSLSLGK |
| 453 | IgG4.1-S217R | ASTKGPSVFPLAPCSRSTSESTAALGCLVKDYFPEP |
| | | VTVSWNSGALTSGVHTFPAVLQSSGLYSLSSVVTV |
| | | PSSSLGTKTYTCNVDHKPSNTKVDKRVERKYGPPC |
| | | PPCPAPEFLGGPSVFLFPPKPKDTLMISRTPEVTCVV |
| | | VDVSQEDPEVQFNWYVDGVEVHNAKTKPREEQFN |
| | | STYRVVSVLTVLHQDWLNGKEYKCKVSNKGLPSSI |
| | | EKTISKAKGQPREPQVYTLPPSQEEMTKNQVSLTCL |
| | | VKGFYPSDIAVEWESNGQPENNYKTTPPVLDSDGS |
| | | FFLYSRLTVDKSRWQEGNVFSCSVMHEALHNHYT |
| | | QKSLSLSLGK |
| 454 | IgG4.1-S217P | ASTKGPSVFPLAPCSRSTSESTAALGCLVKDYFPEP |
| | | VTVSWNSGALTSGVHTFPAVLQSSGLYSLSSVVTV |
| | | PSSSLGTKTYTCNVDHKPSNTKVDKRVEPKYGPPC |
| | | PPCPAPEFLGGPSVFLFPPKPKDTLMISRTPEVTCVV |
| | | VDVSQEDPEVQFNWYVDGVEVHNAKTKPREEQFN |
| | | STYRVVSVLTVLHQDWLNGKEYKCKVSNKGLPSSI |
| | | EKTISKAKGQPREPQVYTLPPSQEEMTKNQVSLTCL |
| | | VKGFYPSDIAVEWESNGQPENNYKTTPPVLDSDGS |
| | | FFLYSRLTVDKSRWQEGNVFSCSVMHEALHNHYT |
| | | QKSLSLSLGK |
| 455 | Heavy chain sequence of nivolumab | QVQLVESGGGVVQPGRSLRLDCKASGITFSNSGMH |
| | | WVRQAPGKGLEWVAVIWYDGSKRYYADSVKGRF |
| | | TISRDNSKNTLFLQMNSLRAEDTAVYYCATNDDY |
| | | WGQGTLVTVSSASTKGPSVFPLAPCSRSTSESTAAL |
| | | GCLVKDYFPEPVTVSWNSGALTSGVHTFPAVLQSS |
| | | GLYSLSSVVTVPSSSLGTKTYTCNVDHKPSNTKVD |
| | | KRVESKYGPPCPPCPAPEFLGGPSVFLFPPKPKDTL |
| | | MISRTPEVTCVVVDVSQEDPEVQFNWYVDGVEVH |
| | | NAKTKPREEQFNSTYRVVSVLTVLHQDWLNGKEY |
| | | KCKVSNKGLPSSIEKTISKAKGQPREPQVYTLPPSQ |
| | | EEMTKNQVSLTCLVKGFYPSDIAVEWESNGQPENN |
| | | YKTTPPVLDSDGSFFLYSRLTVDKSRWQEGNVFSC |
| | | SVMHEALHNHYTQKSLSLSLGK |
| 456 | Light chain sequence of nivolumab | EIVLTQSPATLSLSPGERATLSCRASQSVSSYLAWY |
| | | QQKPGQAPRLLIYDASNRATGIPARFSGSGSGTDFT |
| | | LTISSLEPEDFAVYYCQQSSNWPRTFGQGTKVEIKR |
| | | TVAAPSVFIFPPSDEQLKSGTASVVCLLNNFYPREA |
| | | KVQWKVDNALQSGNSQESVTEQDSKDSTYSLSSTL |
| | | TLSKADYEKHKVYACEVTHQGLSSPVTKSFNRGEC |
| 457 | IgG2.3-R217L | ASTKGPSVFPLAPCSRSTSESTAALGCLVK |
| | | DYFPEPVTVSWNSGALTSGVHTFPAVLQS |
| | | SGLYSLSSVVTVPSSNFGTQTYTCNVDHK |
| | | PSNTKVDKTVE [symbol] K [symbol] VECPPCPAPPVAGPS |
| | | VFLFPPKPKDTLMISRTPEVTCVVVDVSHE |
| | | DPEVQFNWYVDGVEVHNAKTKPREEQFN |
| | | STFRVVSVLTVVHQDWLNGKEYKCKVSN |
| | | KGLPAPIEKTISKTKGQPREPQVYTLPPSRE |
| | | EMTKNQVSLTCLVKGFYPSDIAVEWESNG |
| | | QPENNYKTTPPMLDSDGSFFLYSKLTVDK |
| | | SRWQQGNVFSCSVMHEALHNHYTQKSLS |
| | | LSPGK |
| 458 | IgG2.3-R217V | ASTKGPSVFPLAPCSRSTSESTAALGCLVK |
| | | DYFPEPVTVSWNSGALTSGVHTFPAVLQS |
| | | SGLYSLSSVVTVPSSNFGTQTYTCNVDHK |
| | | PSNTKVDKTVE [symbol] K [symbol] CVECPPCPAPPVAGPS |
| | | VFLFPPKPKDTLMISRTPEVTCVVVDVSHE |
| | | DPEVQFNWYVDGVEVHNAKTKPREEQFN |
| | | STFRVVSVLTVVHQDWLNGKEYKCKVSN |
| | | KGLPAPIEKTISKTKGQPREPQVYTLPPSRE |
| | | EMTKNQVSLTCLVKGFYPSDIAVEWESNG |
| | | QPENNYKTTPPMLDSDGSFFLYSKLTVDK |
| | | SRWQQGNVFSCSVMHEALHNHYTQKSLS |
| | | LSPGK |
| 459 | IgG2.3-R217F | ASTKGPSVFPLAPCSRSTSESTAALGCLVK |
| | | DYFPEPVTVSWNSGALTSGVHTFPAVLQS |
| | | SGLYSLSSVVTVPSSNFGTQTYTCNVDHK |
| | | PSNTKVDKTVE [symbol] K [symbol] CVECPPCPAPPVAGPS |
| | | VFLFPPKPKDTLMISRTPEVTCVVVDVSHE |
| | | DPEVQFNWYVDGVEVHNAKTKPREEQFN |
| | | STFRVVSVLTVVHQDWLNGKEYKCKVSN |
| | | KGLPAPIEKTISKTKGQPREPQVYTLPPSRE |
| | | EMTKNQVSLTCLVKGFYPSDIAVEWESNG |
| | | QPENNYKTTPPMLDSDGSFFLYSKLTVDK |
| | | SRWQQGNVFSCSVMHEALHNHYTQKSLS |
| | | LSPGK |
| 460 | IgG2.3-R217M | ASTKGPSVFPLAPCSRSTSESTAALGCLVK |
| | | DYFPEPVTVSWNSGALTSGVHTFPAVLQS |
| | | SGLYSLSSVVTVPSSNFGTQTYTCNVDHK |
| | | PSNTKVDKTVE [symbol] K [symbol] CVECPPCPAPPVAGP |
| | | SVFLFPPKPKDTLMISRTPEVTCVVVDVSH |
| | | EDPEVQFNWYVDGVEVHNAKTKPREEQF |
| | | NSTFRVVSVLTVVHQDWLNGKEYKCKVS |
| | | NKGLPAPIEKTISKTKGQPREPQVYTLPPSR |
| | | EEMTKNQVSLTCLVKGFYPSDIAVEWESN |
| | | GQPENNYKTTPPMLDSDGSFFLYSKLTVD |
| | | KSRWQQGNVFSCSVMHEALHNHYTQKSL |
| | | SLSPGK |
| 461 | IgG2.3-R217H | ASTKGPSVFPLAPCSRSTSESTAALGCLVK |
| | | DYFPEPVTVSWNSGALTSGVHTFPAVLQS |
| | | SGLYSLSSVVTVPSSNFGTQTYTCNVDHK |
| | | PSNTKVDKTVE [symbol] K [symbol] CVECPPCPAPPVAGPS |
| | | VFLFPPKPKDTLMISRTPEVTCVVVDVSHE |
| | | DPEVQFNWYVDGVEVHNAKTKPREEQFN |
| | | STFRVVSVLTVVHQDWLNGKEYKCKVSN |
| | | KGLPAPIEKTISKTKGQPREPQVYTLPPSRE |
| | | EMTKNQVSLTCLVKGFYPSDIAVEWESNG |
| | | QPENNYKTTPPMLDSDGSFFLYSKLTVDK |
| | | SRWQQGNVFSCSVMHEALHNHYTQKSLS |
| | | LSPGK |
| 462 | IgG2.3-R217Y | ASTKGPSVFPLAPCSRSTSESTAALGCLVK |
| | | DYFPEPVTVSWNSGALTSGVHTFPAVLQS |
| | | SGLYSLSSVVTVPSSNFGTQTYTCNVDHK |
| | | PSNTKVDKTVE [symbol] K [symbol] CVECPPCPAPPVAGPS |
| | | VFLFPPKPKDTLMISRTPEVTCVVVDVSHE |
| | | DPEVQFNWYVDGVEVHNAKTKPREEQFN |
| | | STFRVVSVLTVVHQDWLNGKEYKCKVSN |
| | | KGLPAPIEKTISKTKGQPREPQVYTLPPSRE |
| | | EMTKNQVSLTCLVKGFYPSDIAVEWESNG |
| | | QPENNYKTTPPMLDSDGSFFLYSKLTVDK |
| | | SRWQQGNVFSCSVMHEALHNHYTQKSLS |
| | | LSPGK |
| 463 | IgG2.3-R217W | ASTKGPSVFPLAPCSRSTSESTAALGCLVK |
| | | DYFPEPVTVSWNSGALTSGVHTFPAVLQS |
| | | SGLYSLSSVVTVPSSNFGTQTYTCNVDHK |
| | | PSNTKVDKTVE [symbol] K [symbol] VECPPCPAPPVAGP |
| | | SVFLFPPKPKDTLMISRTPEVTCVVVDVSH |
| | | EDPEVQFNWYVDGVEVHNAKTKPREEQF |
| | | NSTFRVVSVLTVVHQDWLNGKEYKCKVS |
| | | NKGLPAPIEKTISKTKGQPREPQVYTLPPSR |
| | | EEMTKNQVSLTCLVKGFYPSDIAVEWESN |
| | | GQPENNYKTTPPMLDSDGSFFLYSKLTVD |
| | | KSRWQQGNVFSCSVMHEALHNHYTQKSL |
| | | SLSPGK |
| 464 | IgG2.3G1-AY-R2171 | ASTKGPSVFPLAPCSRSTSESTAALGCLVK |
| | | DYFPEPVTVSWNSGALTSGVHTFPAVLQS |
| | | SGLYSLSSVVTVPSSNFGTQTYTCNVDHK |
| | | PSNTKVDKTVE [symbol] K [symbol] CVECPPCPAPELLGGP |
| | | SVFLFPPKPKDTLMISRTPEVTCVVVDVSH |
| | | EDPEVKFNWYVDGVEVHNAKTKPREEQY |
| | | NSTYRVVSVLTVLHQDWLNGKEYKCKVS |
| | | NKALPAPIEKTISKAKGQPREPQVYTLPPS |
| | | REEMTKNQVSLTCLVKGFYPSDIAVEWES |
| | | NGQPENNYKTTPPVLDSDGSFFLYSKLTV |
| | | DKSRWQQGNVFSCSVMHEALHNHYTQKS |
| | | LSLSPGK |
| 465 | IgG2.3G1-AY-R217L | ASTKGPSVFPLAPCSRSTSESTAALGCLVK |
| | | DYFPEPVTVSWNSGALTSGVHTFPAVLQS |
| | | SGLYSLSSVVTVPSSNFGTQTYTCNVDHK |
| | | PSNTKVDKTVE [symbol] K [symbol] CVECPPCPAPELLGG |
| | | PSVFLFPPKPKDTLMISRTPEVTCVVVDVS |
| | | HEDPEVKFNWYVDGVEVHNAKTKPREEQ |
| | | YNSTYRVVSVLTVLHQDWLNGKEYKCKV |
| | | SNKALPAPIEKTISKAKGQPREPQVYTLPPS |
| | | REEMTKNQVSLTCLVKGFYPSDIAVEWES |
| | | NGQPENNYKTTPPVLDSDGSFFLYSKLTV |
| | | DKSRWQQGNVFSCSVMHEALHNHYTQKS |
| | | LSLSPGK |
| 466 | IgG2.3G1-AY-R217V | ASTKGPSVFPLAPCSRSTSESTAALGCLVK |
| | | DYFPEPVTVSWNSGALTSGVHTFPAVLQS |
| | | SGLYSLSSVVTVPSSNFGTQTYTCNVDHK |
| | | PSNTKVDKTVE [symbol] K [symbol] CVECPPCPAPELLGG |
| | | PSVFLFPPKPKDTLMISRTPEVTCVVVDVS |
| | | HEDPEVKFNWYVDGVEVHNAKTKPREEQ |
| | | YNSTYRVVSVLTVLHQDWLNGKEYKCKV |
| | | SNKALPAPIEKTISKAKGQPREPQVYTLPPS |
| | | REEMTKNQVSLTCLVKGFYPSDIAVEWES |
| | | NGQPENNYKTTPPVLDSDGSFFLYSKLTV |
| | | DKSRWQQGNVFSCSVMHEALHNHYTQKS |
| | | LSLSPGK |
| 467 | IgG2.3G1.3f-AY-R2171 | ASTKGPSVFPLAPCSRSTSESTAALGCLVK |
| | | DYFPEPVTVSWNSGALTSGVHTFPAVLQS |
| | | SGLYSLSSVVTVPSSNFGTQTYTCNVDHK |
| | | PSNTKVDKTVE [symbol] K [symbol] CVECPPCPAPE [symbol] G [symbol] P |
| | | SVFLFPPKPKDTLMISRTPEVTCVVVDVSH |
| | | EDPEVKFNWYVDGVEVHNAKTKPREEQY |
| | | NSTYRVVSVLTVLHQDWLNGKEYKCKVS |
| | | NKALPAPIEKTISKAKGQPREPQVYTLPPS |
| | | REEMTKNQVSLTCLVKGFYPSDIAVEWES |
| | | NGQPENNYKTTPPVLDSDGSFFLYSKLTV |
| | | DKSRWQQGNVFSCSVMHEALHNHYTQKS |
| | | LSLSPGK |
| 468 | IgG2.3G1.3f-AY-R217L | ASTKGPSVFPLAPCSRSTSESTAALGCLVK |
| | | DYFPEPVTVSWNSGALTSGVHTFPAVLQS |
| | | SGLYSLSSVVTVPSSNFGTQTYTCNVDHK |
| | | PSNTKVDKTVE [symbol] K [symbol] CVECPPCPAPE [symbol] G [symbol] |
| | | PSVFLFPPKPKDTLMISRTPEVTCVVVDVS |
| | | HEDPEVKFNWYVDGVEVHNAKTKPREEQ |
| | | YNSTYRVVSVLTVLHQDWLNGKEYKCKV |
| | | SNKALPAPIEKTISKAKGQPREPQVYTLPPS |
| | | REEMTKNQVSLTCLVKGFYPSDIAVEWES |
| | | NGQPENNYKTTPPVLDSDGSFFLYSKLTV |
| | | DKSRWQQGNVFSCSVMHEALHNHYTQKS |
| | | LSLSPGK |

The Sequence Listing provides the sequences of the mature variable regions and heavy and light chains (i.e., sequences do not include signal peptides). The sequences of the heavy chains with C-terminal lysine, may also be used without that lysine (K), or without the GK.

The application's sequence listing, which the Patent Office published only in electronic form, follows.

SEQUENCE LISTING (472 sequences)

SEQ ID NO: 1 - protein, 574 aa, Homo sapiens
  misc_feature (1)..(574): Human CD73 isoform 1
MCPRAARAPATLLLALGAVLWPAAGAWELTILHTNDVHSRLEQTSEDSSKCVNASRCMGGVARLFTKVQQIRRAEPNVLLLDAGDQYQGTIWFTVYKGAEVAHFMNALRYDAMALGNHEFDNGVEGLIEPLLKEAKFPILSANIKAKGPLASQISGLYLPYKVLPVGDEVVGIVGYTSKETPFLSNPGTNLVFEDEITALQPEVDKLKTLNVNKIIALGHSGFEMDKLIAQKVRGVDVVVGGHSNTFLYTGNPPSKEVPAGKYPFIVTSDDGRKVPVVQAYAFGKYLGYLKIEFDERGNVISSHGNPILLNSSIPEDPSIKADINKWRIKLDNYSTQELGKTIVYLDGSSQSCRFRECNMGNLICDAMINNNLRHTDEMFWNHVSMCILNGGGIRSPIDERNNGTITWENLAAVLPFGGTFDLVQLKGSTLKKAFEHSVHRYGQSTGEFLQVGGIHVVYDLSRKPGDRVVKLDVLCTKCRVPSYDPLKMDEVYKVILPNFLANGGDGFQMIKDELLRHDSGDQDINVVSTYISKMKVIYPAVEGRIKFSTGSHCHGSFSLIFLSLWAVIFVLYQ

SEQ ID NO: 2 - protein, 524 aa, Homo sapiens
  misc_feature (1)..(524): Human CD73 isoform 2
MCPRAARAPATLLLALGAVLWPAAGAWELTILHTNDVHSRLEQTSEDSSKCVNASRCMGGVARLFTKVQQIRRAEPNVLLLDAGDQYQGTIWFTVYKGAEVAHFMNALRYDAMALGNHEFDNGVEGLIEPLLKEAKFPILSANIKAKGPLASQISGLYLPYKVLPVGDEVVGIVGYTSKETPFLSNPGTNLVFEDEITALQPEVDKLKTLNVNKIIALGHSGFEMDKLIAQKVRGVDVVVGGHSNTFLYTGNPPSKEVPAGKYPFIVTSDDGRKVPVVQAYAFGKYLGYLKIEFDERGNVISSHGNPILLNSSIPEDPSIKADINKWRIKLDNYSTQELGKTIVYLDGSSQSCRFRECNMGNLICDAMINNNLRHTDEMFWNHVSMCILNGGGIRSPIDERNNGIHVVYDLSRKPGDRVVKLDVLCTKCRVPSYDPLKMDEVYKVILPNFLANGGDGFQMIKDELLRHDSGDQDINVVSTYISKMKVIYPAVEGRIKFSTGSHCHGSFSLIFLSLWAVIFVLYQ

SEQ ID NO: 3 - protein, 574 aa, Macaca fascicularis
  misc_feature (1)..(574): Cynomolgus CD73
MCPRAARAPATLLLAVGALLWSAAGAWELTILHTNDVHSRLEQTSEDSSKCVNASRCMGGVARLFTKVQQIRRAEPNVLLLDAGDQYQGTIWFTVYKGAEVAHFMNALRYDAMALGNHEFDNGVEGLIEPLLKEAKFPILSANIKAKGPLASQISGLYLPYKVLPVGDEVVGIVGYTSKETPFLSNPGTNLVFEDEITALQPEVDKLKTLNVNKIIALGHSGFETDKLIAQKVRGVDVVVGGHSNTFLYTGNPPSKEVPAGKYPFIVTSDDGRKVPVVQAYAFGKYLGYLKIEFDERGNVISSHGNPILLNSSIPEDPSIKADINKWRIKLDNYSTQELGKTIVYLDGSSQSCRFRECNMGNLICDAMINNNLRHADEMFWNHVSMCILNGGGIRSPIDERNNGTITWENLAAVLPFGGTFDLVQLKGSTLKKAFEHSVHRYGQSTGEFLQVGGIHVVYDLSRKPGDRVVKLDVLCTKCRVPSYDPLKMDEIYKVILPNFLANGGDGFQMIKDELLRHDSGDQDINVVSTYISKMKVIYPAVEGRIKFSTGSHCHGSFSLIFLSFCAVIFVLYQ

SEQ ID NO: 4 - protein, 121 aa, Artificial Sequence
  Synthetic: 11F11 VH
QVQLVESGGGVVQPGRSLRLSCATSGFTFSNYGMHWVRQAPGKGLEWVAVILYDGSNKYYPDSVKGRFTISRDNSKNTLYLQMNSLRAEDTAVYYCARGGSSWYPDSFDIWGQGTMVTVSS

SEQ ID NO: 5 - protein, 5 aa, Artificial Sequence
  Synthetic: 11F11 VH CDR1
NYGMH

SEQ ID NO: 6 - protein, 17 aa, Artificial Sequence
  Synthetic: 11F11 VH CDR2
VILYDGSNKYYPDSVKG

SEQ ID NO: 7 - protein, 12 aa, Artificial Sequence
  Synthetic: 11F11 VH CDR3
GGSSWYPDSFDI

SEQ ID NO: 8 - protein, 107 aa, Artificial Sequence
  Synthetic: 11F11 VK1
EIVLTQSPATLSLSPGERATLSCRASQGVSSYLAWYQQKPGQAPRLLIYDASNRATGIPARFSGSGPGTDFTLTISSLEPEDFAVYYCQQRSNWHLTFGGGTKVEIK

SEQ ID NO: 9 - protein, 11 aa, Artificial Sequence
  Synthetic: 11F11 VK1 CDR1
RASQGVSSYLA

SEQ ID NO: 10 - protein, 7 aa, Artificial Sequence
  Synthetic: 11F11 VK1 CDR2
DASNRAT

SEQ ID NO: 11 - protein, 9 aa, Artificial Sequence
  Synthetic: 11F11 VK1 CDR3
QQRSNWHLT

SEQ ID NO: 12 - protein, 107 aa, Artificial Sequence
  Synthetic: 11F11 VK2
DIQMTQSPSSLSASVGDRVTITCRASQGISSWLAWYQQKPEKAPKSLIYAASSLQSGVPSRFSGSGSGTDFTLTISSLQPEDFATYYCQQYNSYPLTFGGGTKVEIK

SEQ ID NO: 13 - protein, 11 aa, Artificial Sequence
  Synthetic: 11F11 VK2 CDR1
RASQGISSWLA

SEQ ID NO: 14 - protein, 7 aa, Artificial Sequence
  Synthetic: 11F11 VK2 CDR2
AASSLQS

SEQ ID NO: 15 - protein, 9 aa, Artificial Sequence
  Synthetic: 11F11 VK2 CDR3
QQYNSYPLT

SEQ ID NO: 16 - protein, 120 aa, Artificial Sequence
  Synthetic: 4C3 VH
EVQLVESGGGLVQPGRSLRLSCAASGFTFDDYAMHWVRQAPGKGLEWVSGISWKSGSIGYADSVKGRFTISRDNAKNSLYLQMNSLRAEDTALYYCVKGYYVILTGLDYWGQGTLVTVSS

SEQ ID NO: 17 - protein, 5 aa, Artificial Sequence
  Synthetic: 4C3 VH CDR1
DYAMH

SEQ ID NO: 18 - protein, 17 aa, Artificial Sequence
  Synthetic: 4C3 VH CDR2
GISWKSGSIGYADSVKG

SEQ ID NO: 19 - protein, 11 aa, Artificial Sequence
  Synthetic: 4C3 VH CDR3
GYYVILTGLDY

SEQ ID NO: 20 - protein, 107 aa, Artificial Sequence
  Synthetic: 4C3 VK1
EIVLTQSPGTLSLSPGERATLSCRASQSVSSYLAWYQQKPGQAPRLLIYGASSRATGIPDRFSGSGSGTDFTLTISRLEPEDFAVYYCQQYGSSPLTFGGGTKVEIK

SEQ ID NO: 21 - protein, 12 aa, Artificial Sequence
  Synthetic: 4C3 VK1 CDR1
RASQSVSSYLAW

SEQ ID NO: 22 - protein, 7 aa, Artificial Sequence
  Synthetic: 4C3 VK1 CDR2
ASSRATG

SEQ ID NO: 23 - protein, 8 aa, Artificial Sequence
  Synthetic: 4C3 VK1 CDR3
QYGSSPLT

SEQ ID NO: 24 - protein, 107 aa, Artificial Sequence
  Synthetic: 4C3 VK2
DIQMTQSPSSLSASVGDRVTFTCRASQGISSWLAWYQQKPEKAPKSLIYAASSLQSGVPSRFSGSGSGTDFTLTISSLQPEDFATYYCQQYNSYPPTFGQGTKVEIK

SEQ ID NO: 25 - protein, 11 aa, Artificial Sequence
  Synthetic: 4C3 VK2 CDR1
RASQGISSWLA

SEQ ID NO: 26 - protein, 7 aa, Artificial Sequence
  Synthetic: 4C3 VK2 CDR2
AASSLQS

SEQ ID NO: 27 - protein, 9 aa, Artificial Sequence
  Synthetic: 4C3 VK2 CDR3
QQYNSYPPT

SEQ ID NO: 28 - protein, 107 aa, Artificial Sequence; identical to SEQ ID NO: 24
  Synthetic: 4C3 VK3

SEQ ID NO: 29 - protein, 11 aa, Artificial Sequence
  Synthetic: 4C3 VK3 CDR1
RASQGISSWLA

SEQ ID NO: 30 - protein, 7 aa, Artificial Sequence
  Synthetic: 4C3 VK3 CDR2
AASSLQS

SEQ ID NO: 31 - protein, 9 aa, Artificial Sequence
  Synthetic: 4C3 VK3 CDR3
QQYNSYPPT

SEQ ID NO: 32 - protein, 122 aa, Artificial Sequence
  Synthetic: 4D4 VH
QVQLVESGGGVVQPGRSLRLSCAASGFTFSNYGMHWVRQAPGKGLEWVAVIWYDESNKYYADSVKGRFTISRDNSKNTLFLQMNSLRAEDTAVYYCARGYNSRWYPDAFDIWGQGTMVTVSS

SEQ ID NO: 33 - protein, 5 aa, Artificial Sequence
  Synthetic: 4D4 VH CDR1
NYGMH

SEQ ID NO: 34 - protein, 17 aa, Artificial Sequence
  Synthetic: 4D4 VH CDR2
VIWYDESNKYYADSVKG

SEQ ID NO: 35 - protein, 13 aa, Artificial Sequence
  Synthetic: 4D4 VH CDR3
GYNSRWYPDAFDI

SEQ ID NO: 36 - protein, 107 aa, Artificial Sequence; identical to SEQ ID NO: 12
  Synthetic: 4D4 VK1

SEQ ID NO: 37 - protein, 11 aa, Artificial Sequence
  Synthetic: 4D4 VK1 CDR1
RASQGISSWLA

SEQ ID NO: 38 - protein, 7 aa, Artificial Sequence
  Synthetic: 4D4 VK1 CDR2
AASSLQS

SEQ ID NO: 39 - protein, 9 aa, Artificial Sequence
  Synthetic: 4D4 VK1 CDR3
QQYNSYPLT

SEQ ID NO: 40 - protein, 121 aa, Artificial Sequence
  Synthetic: 10D2 VH1
QVQLVESGGGVVQPGRSLRLSCAASGFTFSNYGLHWVRQAPGKGLEWVAVIRYDGSNKYYADSVKGRFTISRDNSKNTLYLQMSSLRAEDTAVYYCARGGSSWYPDGLDVWGQGTTVTVSS

SEQ ID NO: 41 - protein, 5 aa, Artificial Sequence
  Synthetic: 10D2 VH1 CDR1
NYGLH

SEQ ID NO: 42 - protein, 17 aa, Artificial Sequence
  Synthetic: 10D2 VH1 CDR2
VIRYDGSNKYYADSVKG

SEQ ID NO: 43 - protein, 12 aa, Artificial Sequence
  Synthetic: 10D2 VH1 CDR3
GGSSWYPDGLDV

SEQ ID NO: 44 - protein, 106 aa, Artificial Sequence
  Synthetic: 10D2 VK1
AIQLTQSPSSLSASVGDRVTITCRASQGISSALAWYQQKPGKAPKLLIYDASSLESGVPSRFSGSGSGTDFTLTISSLQPEDFATYYCQQFNSYPTFGGGTKVEIK

SEQ ID NO: 45 - protein, 11 aa, Artificial Sequence
  Synthetic: 10D2 VK1 CDR1
RASQGISSALA

SEQ ID NO: 46 - protein, 7 aa, Artificial Sequence
  Synthetic: 10D2 VK1 CDR2
DASSLES

SEQ ID NO: 47 - protein, 8 aa, Artificial Sequence
  Synthetic: 10D2 VK1 CDR3
QQFNSYPT

SEQ ID NO: 48 - protein, 107 aa, Artificial Sequence; identical to SEQ ID NO: 12
  Synthetic: 10D2 VK2

SEQ ID NO: 49 - protein, 11 aa, Artificial Sequence
  Synthetic: 10D2 VK2 CDR1
RASQGISSWLA

SEQ ID NO: 50 - protein, 7 aa, Artificial Sequence
  Synthetic: 10D2 VK2 CDR2
AASSLQS

SEQ ID NO: 51 - protein, 9 aa, Artificial Sequence
  Synthetic: 10D2 VK2 CDR3
QQYNSYPLT

SEQ ID NO: 52 - protein, 120 aa, Artificial Sequence
  Synthetic: 11A6 VH
EVQLVESGGNLVQPGRSLRLSCAASGFTFDDYAMHWVRQAPGKGLEWVSGISWNNNDIGYADSVKGRFIISRDNAKNSLYLQMNSLRPEDTALYYCVKGYYVILTGLDYWGQGTPVTVSS

SEQ ID NO: 53 - protein, 5 aa, Artificial Sequence
  Synthetic: 11A6 VH CDR1
DYAMH

SEQ ID NO: 54 - protein, 17 aa, Artificial Sequence
  Synthetic: 11A6 VH CDR2
GISWNNNDIGYADSVKG

SEQ ID NO: 55 - protein, 11 aa, Artificial Sequence
  Synthetic: 11A6 VH CDR3
GYYVILTGLDY

SEQ ID NO: 56 - protein, 107 aa, Artificial Sequence; identical to SEQ ID NO: 12
  Synthetic: 11A6 VK1

SEQ ID NO: 57 - protein, 11 aa, Artificial Sequence
  Synthetic: 11A6 VK1 CDR1
RASQGISSWLA

SEQ ID NO: 58 - protein, 7 aa, Artificial Sequence
  Synthetic: 11A6 VK1 CDR2
AASSLQS

SEQ ID NO: 59 - protein, 9 aa, Artificial Sequence
  Synthetic: 11A6 VK1 CDR3
QQYNSYPLT

SEQ ID NO: 60 - protein, 121 aa, Artificial Sequence
  Synthetic: 24H2 VH
QVQLVESGGGVVQPGRSLRLSCAASGFTFSNYGMHWVRQAPGKGLEWVAVIWYDGGNKYYADSVKGRFTISRDNSKNTLFLQMNSLRAEDTAVYYCARGGSSWYPDAFDIWGQGTMVTVSS

SEQ ID NO: 61 - protein, 5 aa, Artificial Sequence
  Synthetic: 24H2 VH CDR1
NYGMH

SEQ ID NO: 62 - protein, 17 aa, Artificial Sequence
  Synthetic: 24H2 VH CDR2
VIWYDGGNKYYADSVKG

SEQ ID NO: 63 - protein, 12 aa, Artificial Sequence
  Synthetic: 24H2 VH CDR3
GGSSWYPDAFDI

SEQ ID NO: 64 - protein, 107 aa, Artificial Sequence; identical to SEQ ID NO: 12
  Synthetic: 24H2 VK1

SEQ ID NO: 65 - protein, 11 aa, Artificial Sequence
  Synthetic: 24H2 VK1 CDR1
RASQGISSWLA

SEQ ID NO: 66 - protein, 7 aa, Artificial Sequence
  Synthetic: 24H2 VK1 CDR2
AASSLQS

SEQ ID NO: 67 - protein, 9 aa, Artificial Sequence
  Synthetic: 24H2 VK1 CDR3
QQYNSYPLT

SEQ ID NO: 68 - protein, 119 aa, Artificial Sequence
  Synthetic: 5F8 VH
EVQLVESGGGLVQPGGSLRLSCAASGFTFSSYWMHWVRQAPGKGLVWVSRIISDGSSTGYADSVKGRFTISRDNAKNTLYLQMNSLRAEDTAVYYCAREFSSGWYFDYWGQGTLVTVSS

SEQ ID NO: 69 - protein, 5 aa, Artificial Sequence
  Synthetic: 5F8 VH CDR1
SYWMH

SEQ ID NO: 70 - protein, 17 aa, Artificial Sequence
  Synthetic: 5F8 VH CDR2
RIISDGSSTGYADSVKG

SEQ ID NO: 71 - protein, 10 aa, Artificial Sequence
  Synthetic: 5F8 VH CDR3
EFSSGWYFDY

SEQ ID NO: 72 - protein, 107 aa, Artificial Sequence
  Synthetic: 5F8 VK1
AIQLTQSPSSLSASVGDRVTITCRASQGISSALAWYQQKPGKAPKLLIYDASSLESGVPSRFSGSGSGTDFTLTISSLQPEDFATYYCQQFSSYPRTFGQGTKVEIK

SEQ ID NO: 73 - protein, 11 aa, Artificial Sequence
  Synthetic: 5F8 VK1 CDR1
RASQGISSALA

SEQ ID NO: 74 - protein, 7 aa, Artificial Sequence
  Synthetic: 5F8 VK1 CDR2
DASSLES

SEQ ID NO: 75 - protein, 9 aa, Artificial Sequence
  Synthetic: 5F8 VK1 CDR3
QQFSSYPRT

SEQ ID NO: 76 - protein, 107 aa, Artificial Sequence
  Synthetic: 5F8 VK2
DIQMTQSPSSLSASVGDRVTITCRASQGISSWLAWYQQKPEKAPKSLIYAASSLQSGVPSRFSGSGSGTGFTLTISSLQPEDFATYYCQQYNSYPRTFGQGTKVEIK

SEQ ID NO: 77 - protein, 11 aa, Artificial Sequence
  Synthetic: 5F8 VK2 CDR1
RASQGISSWLA

SEQ ID NO: 78 - protein, 7 aa, Artificial Sequence
  Synthetic: 5F8 VK2 CDR2
AASSLQS

SEQ ID NO: 79 - protein, 9 aa, Artificial Sequence
  Synthetic: 5F8 VK2 CDR3
QQYNSYPRT

SEQ ID NO: 80 - protein, 121 aa, Artificial Sequence
  Synthetic: 6E11 VH
EVQLVESGGALVQPGRSLRLSCAASGFTFDDYAMHWVRQAPGKGLEWVSGITWNSGGIGYADSVKGRFTISRDNAKNSLYLQMNSLRAEDTALYYCAKDRYYSSWLLFDNWGQGILVTVSS

SEQ ID NO: 81 - protein, 5 aa, Artificial Sequence
  Synthetic: 6E11 VH CDR1
DYAMH

SEQ ID NO: 82 - protein, 17 aa, Artificial Sequence
  Synthetic: 6E11 VH CDR2
GITWNSGGIGYADSVKG

SEQ ID NO: 83 - protein, 12 aa, Artificial Sequence
  Synthetic: 6E11 VH CDR3
DRYYSSWLLFDN

SEQ ID NO: 84 - protein, 107 aa, Artificial Sequence
  Synthetic: 6E11 VK1
EIVLTQSPGTLSLSPGERATLSCRASQSVSSSYLAWYQQKPGQAPRLLIYGASSRATGIPDRFSGSGSGTDFTLTISRLEPEDFAVYYCQHYGSSFTFGPGTKVDIK

SEQ ID NO: 85 - protein, 12 aa, Artificial Sequence
  Synthetic: 6E11 VK1 CDR1
RASQSVSSSYLA

SEQ ID NO: 86 - protein, 7 aa, Artificial Sequence
  Synthetic: 6E11 VK1 CDR2
GASSRAT

SEQ ID NO: 87 - protein, 8 aa, Artificial Sequence
  Synthetic: 6E11 VK1 CDR3
QHYGSSFT

SEQ ID NO: 88 - protein, 121 aa, Artificial Sequence
  Synthetic: 7A11 VH
EVQLVESGGGLVQTGRSLRLSCAASGFTFDDYAMHWVRQAPGKGLEWVSDISWNSDIIGYADSVKGRFTISRDNAKNSLYLQMNSLRAEDTALYYCAKDIYGSGSSFFDYWGQGILVTVSS

SEQ ID NO: 89 - protein, 5 aa, Artificial Sequence
  Synthetic: 7A11 VH CDR1
DYAMH

SEQ ID NO: 90 - protein, 17 aa, Artificial Sequence
  Synthetic: 7A11 VH CDR2
DISWNSDIIGYADSVKG

SEQ ID NO: 91 - protein, 12 aa, Artificial Sequence
  Synthetic: 7A11 VH CDR3
DIYGSGSSFFDY

SEQ ID NO: 92 - protein, 107 aa, Artificial Sequence
  Synthetic: 7A11 VK1
DIQMTQSPSSLSASVGDRVTITCRASQYISSWLAWYQQKPEKAPKSLIYAASSLQSGVPSRFSGSGSGTDFTLTISSLQPEDFATYYCQQYHSYPPTFGQGTRLEIK

SEQ ID NO: 93 - protein, 11 aa, Artificial Sequence
  Synthetic: 7A11 VK1 CDR1
RASQYISSWLA

SEQ ID NO: 94 - protein, 7 aa, Artificial Sequence
  Synthetic: 7A11 VK1 CDR2
AASSLQS

SEQ ID NO: 95 - protein, 9 aa, Artificial Sequence
  Synthetic: 7A11 VK1 CDR3
QQYHSYPPT

SEQ ID NO: 96 - protein, 19 aa, Artificial Sequence
  Synthetic: 11F11 epitope #1
FTKVQQIRRAEPNVLLLDA

SEQ ID NO: 97 - protein, 16 aa, Artificial Sequence
  Synthetic: 11F11 epitope #2
LYLPYKVLPVGDEVVG

SEQ ID NO: 98 - protein, 98 aa, Artificial Sequence
  Synthetic: Wildtype IgG1 CH1
ASTKGPSVFPLAPSSKSTSGGTAALGCLVKDYFPEPVTVSWNSGALTSGVHTFPAVLQSSGLYSLSSVVTVPSSSLGTQTYICNVNHKPSNTKVDKKV

SEQ ID NO: 99 - protein, 553 aa, Artificial Sequence
  Synthetic: His-tagged CD73
MCPRAARAPATLLLALGAVLWPAAGAWELTILHTNDVHSRLEQTSEDSSKCVNASRCMGGVARLFTKVQQIRRAEPNVLLLDAGDQYQGTIWFTVYKGAEVAHFMNALRYDAMALGNHEFDNGVEGLIEPLLKEAKFPILSANIKAKGPLASQISGLYLPYKVLPVGDEVVGIVGYTSKETPFLSNPGTNLVFEDEITALQPEVDKLKTLNVNKIIALGHSGFEMDKLIAQKVRGVDVVVGGHSNTFLYTGNPPSKEVPAGKYPFIVTSDDGRKVPVVQAYAFGKYLGYLKIEFDERGNVISSHGNPILLNSSIPEDPSIKADINKWRIKLDNYSTQELGKTIVYLDGSSQSCRFRECNMGNLICDAMINNNLRHADETFWNHVSMCILNGGGIRSPIDERNNGTITWENLAAVLPFGGTFDLVQLKGSTLKKAFEHSVHRYGQSTGEFLQVGGIHVVYDLSRKPGDRVVKLDVLCTKCRVPSYDPLKMDEVYKVILPNFLANGGDGFQMIKDELLRHDSGDQDINVVSTYISKMKVIYPAVEGRIKHHHHHH

SEQ ID NO: 100 - protein, 447 aa, Artificial Sequence
  Synthetic: 11F11 (full length heavy chain)
QVQLVESGGGVVQPGRSLRLSCATSGFTFSNYGMHWVRQAPGKGLEWVAVILYDGSNKYYPDSVKGRFTISRDNSKNTLYLQMNSLRAEDTAVYYCARGGSSWYPDSFDIWGQGTMVTVSSASTKGPSVFPLAPCSRSTSESTAALGCLVKDYFPEPVTVSWNSGALTSGVHTFPAVLQSSGLYSLSSVVTVPSSNFGTQTYTCNVDHKPSNTKVDKTVERKCCVECPPCPAPPVAGPSVFLFPPKPKDTLMISRTPEVTCVVVDVSHEDPEVQFNWYVDGVEVHNAKTKPREEQFNSTFRVVSVLTVVHQDWLNGKEYKCKVSNKGLPAPIEKTISKTKGQPREPQVYTLPPSREEMTKNQVSLTCLVKGFYPSDIAVEWESNGQPENNYKTTPPMLDSDGSFFLYSKLTVDKSRWQQGNVFSCSVMHEALHNHYTQKSLSLSPGK

SEQ ID NO: 101 - protein, 214 aa, Artificial Sequence
  Synthetic: 11F11 (full length light chain 1)
EIVLTQSPATLSLSPGERATLSCRASQGVSSYLAWYQQKPGQAPRLLIYDASNRATGIPARFSGSGPGTDFTLTISSLEPEDFAVYYCQQRSNWHLTFGGGTKVEIKRTVAAPSVFIFPPSDEQLKSGTASVVCLLNNFYPREAKVQWKVDNALQSGNSQESVTEQDSKDSTYSLSSTLTLSKADYEKHKVYACEVTHQGLSSPVTKSFNRGEC

SEQ ID NO: 102 - protein, 214 aa, Artificial Sequence
  Synthetic: 11F11 (full length light chain 2)
DIQMTQSPSSLSASVGDRVTITCRASQGISSWLAWYQQKPEKAPKSLIYAASSLQSGVPSRFSGSGSGTDFTLTISSLQPEDFATYYCQQYNSYPLTFGGGTKVEIKRTVAAPSVFIFPPSDEQLKSGTASVVCLLNNFYPREAKVQWKVDNALQSGNSQESVTEQDSKDSTYSLSSTLTLSKADYEKHKVYACEVTHQGLSSPVTKSFNRGEC

SEQ ID NO: 103 - protein, 450 aa, Artificial Sequence
  Synthetic: 4C3 (full length heavy chain)
EVQLVESGGGLVQPGRSLRLSCAASGFTFDDYAMHWVRQAPGKGLEWVSGISWKSGSIGYADSVKGRFTISRDNAKNSLYLQMNSLRAEDTALYYCVKGYYVILTGLDYWGQGTLVTVSSASTKGPSVFPLAPSSKSTSGGTAALGCLVKDYFPEPVTVSWNSGALTSGVHTFPAVLQSSGLYSLSSVVTVPSSSLGTQTYICNVNHKPSNTKVDKKVEPKSCDKTHTCPPCPAPELLGGPSVFLFPPKPKDTLMISRTPEVTCVVVDVSHEDPEVKFNWYVDGVEVHNAKTKPREEQYNSTYRVVSVLTVLHQDWLNGKEYKCKVSNKALPAPIEKTISKAKGQPREPQVYTLPPSRDELTKNQVSLTCLVKGFYPSDIAVEWESNGQPENNYKTTPPVLDSDGSFFLYSKLTVDKSRWQQGNVFSCSVMHEALHNHYTQKSLSLSPGK

SEQ ID NO: 104 - protein, 214 aa, Artificial Sequence
  Synthetic: 4C3 (full length light chain 1)
EIVLTQSPGTLSLSPGERATLSCRASQSVSSYLAWYQQKPGQAPRLLIYGASSRATGIPDRFSGSGSGTDFTLTISRLEPEDFAVYYCQQYGSSPLTFGGGTKVEIKRTVAAPSVFIFPPSDEQLKSGTASVVCLLNNFYPREAKVQWKVDNALQSGNSQESVTEQDSKDSTYSLSSTLTLSKADYEKHKVYACEVTHQGLSSPVTKSFNRGEC

SEQ ID NO: 105 - protein, 214 aa, Artificial Sequence
  Synthetic: 4C3 (full length light chain 2)
DIQMTQSPSSLSASVGDRVTFTCRASQGISSWLAWYQQKPEKAPKSLIYAASSLQSGVPSRFSGSGSGTDFTLTISSLQPEDFATYYCQQYNSYPPTFGQGTKVEIKRTVAAPSVFIFPPSDEQLKSGTASVVCLLNNFYPREAKVQWKVDNALQSGNSQESVTEQDSKDSTYSLSSTLTLSKADYEKHKVYACEVTHQGLSSPVTKSFNRGEC

SEQ ID NO: 106 - protein, 214 aa, Artificial Sequence; identical to SEQ ID NO: 105
  Synthetic: 4C3 (full length light chain 3)

SEQ ID NO: 107 - protein, 448 aa, Artificial Sequence
  Synthetic: 4D4 (full length heavy chain)
QVQLVESGGGVVQPGRSLRLSCAASGFTFSNYGMHWVRQAPGKGLEWVAVIWYDESNKYYADSVKGRFTISRDNSKNTLFLQMNSLRAEDTAVYYCARGYNSRWYPDAFDIWGQGTMVTVSSASTKGPSVFPLAPCSRSTSESTAALGCLVKDYFPEPVTVSWNSGALTSGVHTFPAVLQSSGLYSLSSVVTVPSSNFGTQTYTCNVDHKPSNTKVDKTVERKCCVECPPCPAPPVAGPSVFLFPPKPKDTLMISRTPEVTCVVVDVSHEDPEVQFNWYVDGVEVHNAKTKPREEQFNSTFRVVSVLTVVHQDWLNGKEYKCKVSNKGLPAPIEKTISKTKGQPREPQVYTLPPSREEMTKNQVSLTCLVKGFYPSDIAVEWESNGQPENNYKTTPPMLDSDGSFFLYSKLTVDKSRWQQGNVFSCSVMHEALHNHYTQKSLSLSPGK

SEQ ID NO: 108 - protein, 214 aa, Artificial Sequence; identical to SEQ ID NO: 102
  Synthetic: 4D4 (full length light chain 1)

SEQ ID NO: 109 - protein, 448 aa, Artificial Sequence
  Synthetic: 10D2 (full length heavy chain)
QVQLVESGGGVVQPGRSLRLSCAASGFTFSNYGLHWVRQAPGKGLEWVAVIRYDGSNKYYADSVKGRFTISRDNSKNTLYLQMSSLRAEDTAVYYCARGGSSWYPDGLDVWGQGTTVTVSSASTKGPSVFPLAPCSRSTSESTAALGCLVKDYFPEPVTVSWNSGALTSGVHTFPAVLQSSGLYSLSSVVTVPSSSLGTKTYTCNVDHKPSNTKVDKRVESKYGPPCPSCPAPEFLGGPSVFLFPPKPKDTLMISRTPEVTCVVVDVSQEDPEVQFNWYVDGVEVHNAKTKPREEQFNSTYRVVSVLTVLHQDWLNGKEYKCKVSNKGLPSSIEKTISKAKGQPREPQVYTLPPSQEEMTKNQVSLTCLVKGFYPSDIAVEWESNGQPENNYKTTPPVLDSDGSFFLYSRLTVDKSRWQEGNVFSCSVMHEALHNHYTQKSLSLSLGK

SEQ ID NO: 110 - protein, 213 aa, Artificial Sequence
  Synthetic: 10D2 (full length light chain 1)
AIQLTQSPSSLSASVGDRVTITCRASQGISSALAWYQQKPGKAPKLLIYDASSLESGVPSRFSGSGSGTDFTLTISSLQPEDFATYYCQQFNSYPTFGGGTKVEIKRTVAAPSVFIFPPSDEQLKSGTASVVCLLNNFYPREAKVQWKVDNALQSGNSQESVTEQDSKDSTYSLSSTLTLSKADYEKHKVYACEVTHQGLSSPVTKSFNRGEC

SEQ ID NO: 111 - protein, 214 aa, Artificial Sequence; identical to SEQ ID NO: 102
  Synthetic: 10D2 (full length light chain 2)

SEQ ID NO: 112 - protein, 450 aa, Artificial Sequence
  Synthetic: 11A6 (full length heavy chain)
EVQLVESGGNLVQPGRSLRLSCAASGFTFDDYAMHWVRQAPGKGLEWVSGISWNNNDIGYADSVKGRFIISRDNAKNSLYLQMNSLRPEDTALYYCVKGYYVILTGLDYWGQGTPVTVSSASTKGPSVFPLAPSSKSTSGGTAALGCLVKDYFPEPVTVSWNSGALTSGVHTFPAVLQSSGLYSLSSVVTVPSSSLGTQTYICNVNHKPSNTKVDKKVEPKSCDKTHTCPPCPAPELLGGPSVFLFPPKPKDTLMISRTPEVTCVVVDVSHEDPEVKFNWYVDGVEVHNAKTKPREEQYNSTYRVVSVLTVLHQDWLNGKEYKCKVSNKALPAPIEKTISKAKGQPREPQVYTLPPSRDELTKNQVSLTCLVKGFYPSDIAVEWESNGQPENNYKTTPPVLDSDGSFFLYSKLTVDKSRWQQGNVFSCSVMHEALHNHYTQKSLSLSPGK

SEQ ID NO: 113 - protein, 214 aa, Artificial Sequence; identical to SEQ ID NO: 102
  Synthetic: 11A6 (full length light chain 1)

SEQ ID NO: 114 - protein, 448 aa, Artificial Sequence
  Synthetic: 24H2 (full length heavy chain)
QVQLVESGGGVVQPGRSLRLSCAASGFTFSNYGMHWVRQAPGKGLEWVAVIWYDGGNKYYADSVKGRFTISRDNSKNTLFLQMNSLRAEDTAVYYCARGGSSWYPDAFDIWGQGTMVTVSSASTKGPSVFPLAPCSRSTSESTAALGCLVKDYFPEPVTVSWNSGALTSGVHTFPAVLQSSGLYSLSSVVTVPSSSLGTKTYTCNVDHKPSNTKVDKRVESKYGPPCPSCPAPEFLGGPSVFLFPPKPKDTLMISRTPEVTCVVVDVSQEDPEVQFNWYVDGVEVHNAKTKPREEQFNSTYRVVSVLTVLHQDWLNGKEYKCKVSNKGLPSSIEKTISKAKGQPREPQVYTLPPSQEEMTKNQVSLTCLVKGFYPSDIAVEWESNGQPENNYKTTPPVLDSDGSFFLYSRLTVDKSRWQEGNVFSCSVMHEALHNHYTQKSLSLSLGK

SEQ ID NO: 115 - protein, 214 aa, Artificial Sequence; identical to SEQ ID NO: 102
  Synthetic: 24H2 (full length light chain 1)

SEQ ID NO: 116 - protein, 449 aa, Artificial Sequence
  Synthetic: 5F8 (full length heavy chain)
EVQLVESGGGLVQPGGSLRLSCAASGFTFSSYWMHWVRQAPGKGLVWVSRIISDGSSTGYADSVKGRFTISRDNAKNTLYLQMNSLRAEDTAVYYCAREFSSGWYFDYWGQGTLVTVSSASTKGPSVFPLAPSSKSTSGGTAALGCLVKDYFPEPVTVSWNSGALTSGVHTFPAVLQSSGLYSLSSVVTVPSSSLGTQTYICNVNHKPSNTKVDKKVEPKSCDKTHTCPPCPAPELLGGPSVFLFPPKPKDTLMISRTPEVTCVVVDVSHEDPEVKFNWYVDGVEVHNAKTKPREEQYNSTYRVVSVLTVLHQDWLNGKEYKCKVSNKALPAPIEKTISKAKGQPREPQVYTLPPSRDELTKNQVSLTCLVKGFYPSDIAVEWESNGQPENNYKTTPPVLDSDGSFFLYSKLTVDKSRWQQGNVFSCSVMHEALHNHYTQKSLSLSPGK

SEQ ID NO: 117 - protein, 214 aa, Artificial Sequence
  Synthetic: 5F8 (full length light chain 1)
AIQLTQSPSSLSASVGDRVTITCRASQGISSALAWYQQKPGKAPKLLIYDASSLESGVPSRFSGSGSGTDFTLTISSLQPEDFATYYCQQFSSYPRTFGQGTKVEIKRTVAAPSVFIFPPSDEQLKSGTASVVCLLNNFYPREAKVQWKVDNALQSGNSQESVTEQDSKDSTYSLSSTLTLSKADYEKHKVYACEVTHQGLSSPVTKSFNRGEC

SEQ ID NO: 118 - protein, 214 aa, Artificial Sequence
  Synthetic: 5F8 (full length light chain 2)
DIQMTQSPSSLSASVGDRVTITCRASQGISSWLAWYQQKPEKAPKSLIYAASSLQSGVPSRFSGSGSGTGFTLTISSLQPEDFATYYCQQYNSYPRTFGQGTKVEIKRTVAAPSVFIFPPSDEQLKSGTASVVCLLNNFYPREAKVQWKVDNALQSGNSQESVTEQDSKDSTYSLSSTLTLSKADYEKHKVYACEVTHQGLSSPVTKSFNRGEC

SEQ ID NO: 119 - protein, 451 aa, Artificial Sequence
  Synthetic: 6E11 (full length heavy chain)
EVQLVESGGALVQPGRSLRLSCAASGFTFDDYAMHWVRQAPGKGLEWVSGITWNSGGIGYADSVKGRFTISRDNAKNSLYLQMNSLRAEDTALYYCAKDRYYSSWLLFDNWGQGILVTVSSASTKGPSVFPLAPSSKSTSGGTAALGCLVKDYFPEPVTVSWNSGALTSGVHTFPAVLQSSGLYSLSSVVTVPSSSLGTQTYICNVNHKPSNTKVDKKVEPKSCDKTHTCPPCPAPELLGGPSVFLFPPKPKDTLMISRTPEVTCVVVDVSHEDPEVKFNWYVDGVEVHNAKTKPREEQYNSTYRVVSVLTVLHQDWLNGKEYKCKVSNKALPAPIEKTISKAKGQPREPQVYTLPPSRDELTKNQVSLTCLVKGFYPSDIAVEWESNGQPENNYKTTPPVLDSDGSFFLYSKLTVDKSRWQQGNVFSCSVMHEALHNHYTQKSLSLSPGK

SEQ ID NO: 120 - protein, 214 aa, Artificial Sequence
  Synthetic: 6E11 (full length light chain 1)
EIVLTQSPGTLSLSPGERATLSCRASQSVSSSYLAWYQQKPGQAPRLLIYGASSRATGIPDRFSGSGSGTDFTLTISRLEPEDFAVYYCQHYGSSFTFGPGTKVDIKRTVAAPSVFIFPPSDEQLKSGTASVVCLLNNFYPREAKVQWKVDNALQSGNSQESVTEQDSKDSTYSLSSTLTLSKADYEKHKVYACEVTHQGLSSPVTKSFNRGEC

SEQ ID NO: 121 - protein, 451 aa, Artificial Sequence
  Synthetic: 7A11 (full length heavy chain)
EVQLVESGGGLVQTGRSLRLSCAASGFTFDDYAMHWVRQAPGKGLEWVSDISWNSDIIGYADSVKGRFTISRDNAKNSLYLQMNSLRAEDTALYYCAKDIYGSGSSFFDYWGQGILVTVSSASTKGPSVFPLAPSSKSTSGGTAALGCLVKDYFPEPVTVSWNSGALTSGVHTFPAVLQSSGLYSLSSVVTVPSSSLGTQTYICNVNHKPSNTKVDKKVEPKSCDKTHTCPPCPAPELLGGPSVFLFPPKPKDTLMISRTPEVTCVVVDVSHEDPEVKFNWYVDGVEVHNAKTKPREEQYNSTYRVVSVLTVLHQDWLNGKEYKCKVSNKALPAPIEKTISKAKGQPREPQVYTLPPSRDELTKNQVSLTCLVKGFYPSDIAVEWESNGQPENNYKTTPPVLDSDGSFFLYSKLTVDKSRWQQGNVFSCSVMHEALHNHYTQKSLSLSPGK

SEQ ID NO: 122 - protein, 214 aa, Artificial Sequence
  Synthetic: 7A11 (full length light chain 1)
DIQMTQSPSSLSASVGDRVTITCRASQYISSWLAWYQQKPEKAPKSLIYAASSLQSGVPSRFSGSGSGTDFTLTISSLQPEDFATYYCQQYHSYPPTFGQGTRLEIKRTVAAPSVFIFPPSDEQLKSGTASVVCLLNNFYPREAKVQWKVDNALQSGNSQESVTEQDSKDSTYSLSSTLTLSKADYEKHKVYACEVTHQGLSSPVTKSFNRGEC

SEQ ID NO: 123 - protein, 18 aa, Artificial Sequence
  Synthetic: Hinge C219S
ERKSCVECPPCPAPPVAG

SEQ ID NO: 124 - protein, 98 aa, Artificial Sequence
  Synthetic: IgG2 CH1 (wildtype)
ASTKGPSVFPLAPCSRSTSESTAALGCLVKDYFPEPVTVSWNSGALTSGVHTFPAVLQSSGLYSLSSVVTVPSSNFGTQTYTCNVDHKPSNTKVDKTV

SEQ ID NO: 125 - protein, 103 aa, Artificial Sequence
  Synthetic: IgG1 CH2 + A330S and P331S
PSVFLFPPKPKDTLMISRTPEVTCVVVDVSHEDPEVKFNWYVDGVEVHNAKTKPREEQYNSTYRVVSVLTVLHQDWLNGKEYKCKVSNKALPSSIEKTISKAK

SEQ ID NO: 126 - protein, 330 aa, Homo sapiens [sequence omitted]

SEQ ID NO: 127 - protein, 330 aa, Homo sapiens
  misc_feature (1)..(330): Human IgG1 constant region (allotype variant)
ASTKGPSVFPLAPSSKSTSGGTAALGCLVKDYFPEPVTVSWNSGALTSGVHTFPAVLQSSGLYSLSSVVTVPSSSLGTQTYICNVNHKPSNTKVDKKVEPKSCDKTHTCPPCPAPELLGGPSVFLFPPKPKDTLMISRTPEVTCVVVDVSHEDPEVKFNWYVDGVEVHNAKTKPREEQYNSTYRVVSVLTVLHQDWLNGKEYKCKVSNKALPAPIEKTISKAKGQPREPQVYTLPPSREEMTKNQVSLTCLVKGFYPSDIAVEWESNGQPENNYKTTPPVLDSDGSFFLYSKLTVDKSRWQQGNVFSCSVMHEALHNHYTQKSLSLSPGK

SEQ ID NO: 128 - protein, 107 aa, Artificial Sequence
  Synthetic: IgG1 CH3 + E356 and M358
GQPREPQVYTLPPSREEMTKNQVSLTCLVKGFYPSDIAVEWESNGQPENNYKTTPPVLDSDGSFFLYSKLTVDKSRWQQGNVFSCSVMHEALHNHYTQKSLSLSPGK

SEQ ID NO: 129 - protein, 330 aa, Artificial Sequence [sequence omitted]

SEQ ID NO: 130 - protein, 326 aa, Artificial Sequence
  Synthetic: IgG2 constant region
ASTKGPSVFPLAPCSRSTSESTAALGCLVKDYFPEPVTVSWNSGALTSGVHTFPAVLQSSGLYSLSSVVTVPSSNFGTQTYTCNVDHKPSNTKVDKTVERKCCVECPPCPAPPVAGPSVFLFPPKPKDTLMISRTPEVTCVVVDVSHEDPEVQFNWYVDGVEVHNAKTKPREEQFNSTFRVVSVLTVVHQDWLNGKEYKCKVSNKGLPAPIEKTISKTKGQPREPQVYTLPPSREEMTKNQVSLTCLVKGFYPSDIAVEWESNGQPENNYKTTPPMLDSDGSFFLYSKLTVDKSRWQQGNVFSCSVMHEALHNHYTQKSLSLSPGK

SEQ ID NO: 131 - protein, 107 aa, Homo sapiens [sequence omitted]

SEQ ID NO: 132 - protein, 5 aa, Artificial Sequence
  Synthetic: Heavy chain C-terminus
LSPGK

SEQ ID NO: 133 - protein, 447 aa, Artificial Sequence
  Synthetic: CD73.4-IgG2CS-IgG1.1f, AA sequence
QVQLVESGGGVVQPGRSLRLSCAASGFTFSNYGMHWVRQAPGKGLEWVAVILYDGSNKYYPDSVKGRFTISRDNSKNTLYLQMNSLRAEDTAVYYCARGGSSWYPDSFDIWGQGTMVTVSSASTKGPSVFPLAPCSRSTSESTAALGCLVKDYFPEPVTVSWNSGALTSGVHTFPAVLQSSGLYSLSSVVTVPSSNFGTQTYTCNVDHKPSNTKVDKTVERKSCVECPPCPAPPVAGPSVFLFPPKPKDTLMISRTPEVTCVVVDVSHEDPEVKFNWYVDGVEVHNAKTKPREEQYNSTYRVVSVLTVLHQDWLNGKEYKCKVSNKALPSSIEKTISKAKGQPREPQVYTLPPSREEMTKNQVSLTCLVKGFYPSDIAVEWESNGQPENNYKTTPPVLDSDGSFFLYSKLTVDKSRWQQGNVFSCSVMHEALHNHYTQKSLSLSPGK

SEQ ID NO: 134 - DNA, 1341 bp, Artificial Sequence
  Synthetic: CD73.4-IgG2CS-IgG1.1f, NT sequence
caggtgcagctggtggagtctgggggaggcgtggtccagcctgggaggtccctgagactctcctgtgcagcctctggattcaccttcagtaactatggcatgcactgggtccgccaggctccaggcaaggggctggagtgggtggcagttatattgtatgatggaagtaataaatactatccagactccgtgaagggccgattcaccatctccagagacaattccaagaacacgctgtatctgcaaatgaacagcctgagagccgaggacacggctgtgtattactgtgcgagagggggcagcagctggtaccctgattcttttgatatctggggccaaggaacaatggtcaccgtctcttcagcgtcgaccaagggcccatcggtcttccccctggcgccctgctccaggagcacctccgagagcacagcggccctgggctgcctggtcaaggactacttccccgaaccggtgacggtgtcgtggaactcaggcgctctgaccagcggcgtgcacaccttcccagctgtcctacagtcctcaggactctactccctcagcagcgtggtgaccgtgccctccagcaacttcggcacccagacctacacctgcaacgtagatcacaagcccagcaacaccaaggtggacaagacagttgagcgcaaatcctgtgtcgagtgcccaccgtgcccagcaccacctgtggcaggaccgtcagtcttcctcttccccccaaaacccaaggacaccctcatgatctcccggacccctgaggtcacatgcgtggtggtggacgtgagccacgaagaccctgaggtcaagttcaactggtacgtggacggcgtggaggtgcataatgccaagacaaagccgcgggaggagcagtacaacagcacgtaccgtgtggtcagcgtcctcaccgtcctgcaccaggactggctgaatggcaaggagtacaagtgcaaggtctccaacaaagccctcccaagcagcatcgagaaaaccatctccaaagccaaagggcagccccgagaaccacaggtgtacaccctgcccccatcccgggaggagatgaccaagaaccaggtcagcctgacctgcctggtcaaaggcttctatcccagcgacatcgccgtggagtgggagagcaatgggcagccggagaacaactacaagaccacgcctcccgtgctggactccgacggctccttcttcctctatagcaagctcaccgtggacaagagcaggtggcagcaggggaacgtcttctcatgctccgtgatgcatgaggctctgcacaaccactacacgcagaagagcctctccctgtccccgggtaaa

SEQ ID NO: 135 - protein, 121 aa, Artificial Sequence
  Synthetic: CD73.4 VH (a.a.)
QVQLVESGGGVVQPGRSLRLSCAASGFTFSNYGMHWVRQAPGKGLEWVAVILYDGSNKYYPDSVKGRFTISRDNSKNTLYLQMNSLRAEDTAVYYCARGGSSWYPDSFDIWGQGTMVTVSS

SEQ ID NO: 136 - protein, 18 aa, Artificial Sequence
  Synthetic: Wildtype IgG2 hinge
ERKCCVECPPCPAPPVAG

SEQ ID NO: 137 - protein, 103 aa, Artificial Sequence
  Synthetic: Wildtype IgG1 CH2
PSVFLFPPKPKDTLMISRTPEVTCVVVDVSHEDPEVKFNWYVDGVEVHNAKTKPREEQYNSTYRVVSVLTVLHQDWLNGKEYKCKVSNKALPAPIEKTISKAK

SEQ ID NO: 138 - protein, 107 aa, Artificial Sequence; identical to SEQ ID NO: 128
  Synthetic: Wildtype IgG1 CH3

SEQ ID NO: 139 - DNA, 363 bp, Artificial Sequence
  Synthetic: 11F11 VH - Nucleotide Sequence
caggtgcagctggtggagtctgggggaggcgtggtccagcctgggaggtccctgagactctcctgtgcaacgtctggattcaccttcagtaactatggcatgcactgggtccgccaggctccaggcaaggggctggagtgggtggcagttatattgtatgatggaagtaataaatactatccagactccgtgaagggccgattcaccatctccagagacaattccaagaacacgctgtatctgcaaatgaacagcctgagagccgaggacacggctgtgtattactgtgcgagagggggcagcagctggtaccctgattcttttgatatctggggccaaggaacaatggtcaccgtctcttca

SEQ ID NO: 140 - DNA, 321 bp, Artificial Sequence
  Synthetic: 11F11 VK1 - Nucleotide Sequence
gaaattgtgttgacacagtctccagccaccctgtctttgtctccaggggaaagagccaccctctcctgcagggccagtcagggtgttagcagctacttagcctggtaccagcagaaacctggccaggctcccaggctcctcatctatgatgcatccaacagggccactggcatcccagccaggttcagtggcagtgggcctgggacagacttcactctcaccatcagcagcctagagcctgaagattttgcagtttattactgtcagcagcgtagcaactggcatctcactttcggcggagggaccaaggtggagatcaaa

SEQ ID NO: 141 - DNA, 321 bp, Artificial Sequence
  Synthetic: 11F11 VK2 - Nucleotide Sequence
gacatccagatgacccagtctccatcctcactgtctgcatctgtaggagacagagtcaccatcacttgtcgggcgagtcagggtattagcagctggttagcctggtatcagcagaaaccagagaaagcccctaagtccctgatctatgctgcatccagtttgcaaagtggggtcccatcaaggttcagcggcagtggatctgggacagatttcactctcaccatcagcagcctgcagcctgaagattttgcaacttattactgccaacagtataatagttaccctctcactttcggcggagggaccaaggtggagatcaaa

SEQ ID NO: 142 - DNA, 360 bp, Artificial Sequence
  Synthetic: 4C3 VH - Nucleotide Sequence
gaagtgcagctggtggagtctgggggaggcttggtacagcctggcaggtccctgagactctcctgtgcagcctctggattcacctttgatgattatgccatgcactgggtccggcaagctccagggaagggcctggagtgggtctcaggtattagttggaagagtggtagcataggctatgcggactctgtgaagggccgattcaccatctccagagacaacgccaagaactccctgtatctgcaaatgaacagtctgagagctgaggacacggccttgtattactgtgtaaaagggtattacgttattttgactggccttgactactggggccagggaaccctggtcaccgtctcctca

SEQ ID NO: 143 - DNA, 321 bp, Artificial Sequence
  Synthetic: 4C3 VK1 - Nucleotide Sequence
gaaattgtgttgacgcagtctccaggcaccctgtctttgtctccaggggaaagagccaccctctcctgcagggccagtcagagtgttagcagctacttagcctggtaccagcagaaacctggccaggctcccaggctcctcatctatggtgcatccagcagggccactggcatcccagacaggttcagtggcagtgggtctgggacagacttcactctcaccatcagcagactggagcctgaagattttgcagtgtattactgtcagcagtatggtagctcaccgctcactttcggcggagggaccaaggtggagatcaaa

SEQ ID NO: 144 - DNA, 321 bp, Artificial Sequence
  Synthetic: 4C3 VK2 - Nucleotide Sequence
gacatccagatgacccagtctccatcctcactgtctgcatctgtaggagacagagtcaccttcacttgtcgggcgagtcagggtattagcagctggttagcctggtatcagcagaaaccagagaaagcccctaagtccctgatctatgctgcatccagtttgcaaagtggggtcccatcaaggttcagcggcagtggatctgggacagatttcactctcaccatcagcagcctgcagcctgaagattttgcaacttattactgccaacagtataatagttaccctccaacgttcggccaggggaccaaggtggaaatcaaa

SEQ ID NO: 145 - DNA, 321 bp, Artificial Sequence
  Synthetic: 4C3 VK3 - Nucleotide Sequence
gacatccagatgacccagtctccatcctcactgtctgcatctgtaggagacagagtcaccttcacttgtcgggcgagtcagggtattagcagctggttagcctggtatcagcagaaaccagagaaagcccctaagtccctgatctatgctgcatccagtttgcaaagtggggtcccatcaaggttcagcggcagtggatctgggacagatttcactctcaccatcagcagcctgcagcctgaagattttgcaacttattactgccaacagtataatagttaccctccaacgttcggccaagggaccaaggtggaaatcaaa

SEQ ID NO: 146 - DNA, 366 bp, Artificial Sequence
  Synthetic: 4D4 VH - Nucleotide Sequence
caggtgcagctggtggagtctgggggaggcgtggtccagcctgggaggtccctgagactctcctgtgcagcgtctggattcaccttcagtaactatggcatgcactgggtccgccaggctccaggcaaggggctggagtgggtggcagttatatggtatgatgaaagtaataaatactatgcagactccgtgaagggccgattcaccatctccagagacaattccaagaacacgctgtttctgcaaatgaacagcctgagagccgaggacacggctgtgtattattgtgcgagagggtataacagcaggtggtaccctgatgcttttgatatctggggccaagggacaatggtcaccgtctcttca

SEQ ID NO: 147 - DNA, 321 bp, Artificial Sequence
  Synthetic: 4D4 VK1 - Nucleotide Sequence
gacatccagatgacccagtctccatcctcactgtctgcatctgtaggagacagagtcaccatcacttgtcgggcgagtcagggtattagcagctggttagcctggtatcagcagaaaccagagaaagcccctaagtccctgatctatgctgcatccagtttgcaaagtggggtcccatcaaggttcagcggcagtggatctgggacagatttcactctcaccatcagcagcctgcagcctgaagattttgcaacttattactgccaacagtataatagttacccgctcactttcggcggagggaccaaggtggagatcaaa

SEQ ID NO: 148 - DNA, 363 bp, Artificial Sequence
  Synthetic: 10D2 VH1 - Nucleotide Sequence
caggtgcagctggtggagtctgggggaggcgtggtccagcctgggaggtccctgagactctcctgtgcagcgtctggattcaccttcagtaactatggcctgcactgggtccgccaggctccaggcaaggggctggagtgggtggcagttatacggtatgatggaagtaataaatactatgcagactccgtgaagggccgattcaccatctccagagacaattccaagaacacgctgtatctgcaaatgagcagcctgagagccgaggacacggctgtgtattactgtgcgagggggggcagcagctggtacccggacggtttggacgtctggggccaagggaccacggtcaccgtctcctca

SEQ ID NO: 149 - DNA, 318 bp, Artificial Sequence
  Synthetic: 10D2 VK1 - Nucleotide Sequence
gccatccagttgacccagtctccatcctccctgtctgcatctgtaggagacagagtcaccatcacttgccgggcaagtcagggcattagcagtgctttagcctggtatcagcagaaaccagggaaagctcctaagctcctgatctatgatgcctccagtttggaaagtggggtcccatcaaggttcagcggcagtggatctgggacagatttcactctcaccatcagcagcctgcagcctgaagattttgcaacttattactgtcaacagtttaatagttaccccactttcggcggagggaccaaggtggagatcaaa

SEQ ID NO: 150 - DNA, 321 bp, Artificial Sequence; identical to SEQ ID NO: 147
  Synthetic: 10D2 VK2 - Nucleotide Sequence

SEQ ID NO: 151 - DNA, 360 bp, Artificial Sequence
  Synthetic: 11A6 VH - Nucleotide Sequence
gaagtgcagctggtggaatctgggggaaacttggtacagcctggcaggtccctgagactctcctgtgcagcctctggattcacctttgatgattatgccatgcactgggtccggcaagctccagggaagggcctggagtgggtctcaggtattagttggaataataatgacataggctatgcggactctgtgaagggccgattcatcatctccagagacaacgccaagaactccctgtatctgcaaatgaacagtctgagacctgaggacacggccttgtattattgtgtaaaaggttattacgttattttgactggtcttgactactggggccagggaaccccggtcaccgtctcctca

SEQ ID NO: 152 - DNA, 321 bp, Artificial Sequence; identical to SEQ ID NO: 147
  Synthetic: 11A6 VK1 - Nucleotide Sequence

SEQ ID NO: 153 - DNA, 363 bp, Artificial Sequence
  Synthetic: 24H2 VH - Nucleotide Sequence
caggtgcaactggtggagtctgggggaggcgtggtccagcctgggaggtccctgagactctcctgtgcagcgtctggattcaccttcagtaactatggcatgcactgggtccgccaggctccaggcaaggggctggagtgggtggcagttatatggtatgatggaggtaataaatactatgcagactccgtgaagggccgattcaccatctccagagacaattccaagaacacgctgtttctgcaaatgaacagcctgagagccgaagacacggctgtgtattactgtgcgagagggggcagcagctggtaccctgatgcttttgatatctggggccaagggacaatggtcaccgtctcttca

SEQ ID NO: 154 - DNA, 321 bp, Artificial Sequence; identical to SEQ ID NO: 141
  Synthetic: 24H2 VK1 - Nucleotide Sequence

SEQ ID NO: 155 - DNA, 357 bp, Artificial Sequence
  Synthetic: 5F8 VH - Nucleotide Sequence
gaggtgcagctggtggagtccgggggaggcttagttcagcctggggggtccctgagactctcctgtgcagcctctggattcaccttcagtagctactggatgcactgggtccgccaagctccagggaaggggctggtgtgggtctcacgtattattagtgatgggagtagcacaggttacgcggattccgtgaagggccgattcaccatctccagagacaacgccaagaacacgctgtatctgcaaatgaacagtctgagagccgaggacacggctgtgtattactgtgcaagagagtttagcagtggctggtactttgactactggggccagggaaccctggtcaccgtctcctca

SEQ ID NO: 156 - DNA, 321 bp, Artificial Sequence
  Synthetic: 5F8 VK1 - Nucleotide Sequence
gccatccagttgacccagtctccatcctccctgtctgcatctgtaggagacagagtcaccatcacttgccgggcaagtcagggcattagcagtgctttagcctggtatcagcagaaaccagggaaagctcctaagctcctgatctatgatgcctccagtttggaaagtggggtcccatcaaggttcagcggcagtggatctgggacagatttcactctcaccatcagcagcctgcagcctgaagattttgcaacttattactgtcaacagtttagtagttaccctcggacgttcggccaagggaccaaggtggaaatcaaa

SEQ ID NO: 157 - DNA, 321 bp, Artificial Sequence
  Synthetic: 5F8 VK2 - Nucleotide Sequence
gacatccagatgacccagtctccatcctcactgtctgcatctgtaggagacagagtcaccatcacttgtcgggcgagtcagggtattagcagctggttagcctggtatcagcagaaaccagagaaagcccctaagtccctgatctatgctgcatccagtttgcaaagtggggtcccatcaaggttcagcggcagtggatctgggacaggtttcactctcaccatcagcagcctgcagcctgaagattttgcaacttattactgccaacagtataatagttaccctcggacgttcggccaagggaccaaggtggaaatcaaa

SEQ ID NO: 158 - DNA, 363 bp, Artificial Sequence
  Synthetic: 6E11 VH - Nucleotide Sequence
gaagtgcagctggtggagtctgggggagccttggtacagcctggcaggtccctgagactctcctgtgcagcctctggattcacctttgatgattatgccatgcactgggtccggcaagctccagggaagggcctggagtgggtctcaggtattacttggaatagtggtggcataggctacgcggactctgtgaagggccgattcaccatctccagagacaacgccaagaactccctgtatctgcaaatgaacagtctgagagctgaggacacggccttgtattactgtgcaaaagataggtattacagcagttggctcctctttgacaactggggccagggaattctggtcaccgtctcctca

SEQ ID NO: 159 - DNA, 321 bp, Artificial Sequence
  Synthetic: 6E11 VK1 - Nucleotide Sequence
gaaattgtgttgacgcagtctccaggcaccctgtctttgtctccaggggaaagagccaccctctcctgcagggccagtcagagtgttagcagcagctacttagcctggtaccagcagaaacctggccaggctcccaggctcctcatctatggtgcatccagcagggccactggcatcccagacaggttcagtggcagtgggtctgggacagacttcactctcaccatcagcagactggagcctgaagattttgcagtgtattactgtcagcattatggtagctcattcactttcggccctgggaccaaagtggatatcaaa

SEQ ID NO: 160 - DNA, 363 bp, Artificial Sequence
  Synthetic: 7A11 VH - Nucleotide Sequence
gaagtgcagctggtggagtctgggggaggcttggtacagactggcaggtccctgagactctcctgtgcagcctctggattcacctttgatgattatgccatgcactgggtccggcaagctccagggaagggcctggagtgggtctcagatattagttggaatagtgatattataggctatgcggactctgtgaagggccgattcaccatctctagagacaacgccaagaactccctgtatctgcaaatgaacagtctgagagctgaggacacggccttgtattactgtgcaaaagatatttatggttcggggagttctttttttgactactggggccagggaatcctggtcaccgtctcctca

SEQ ID NO: 161 - DNA, 321 bp, Artificial Sequence
  Synthetic: 7A11 VK1 - Nucleotide Sequence
gacatccagatgacccagtctccatcctcactgtctgcatctgtaggagacagagtcaccatcacttgtcgggcgagtcagtatattagcagctggttagcctggtatcagcagaaaccagagaaagcccctaagtccctgatctatgctgcatccagtttgcaaagtggggtcccatcaaggttcagcggcagtggatctgggacagatttcactctcaccatcagcagcctgcagcctgaagattttgcaacttattactgccaacagtatcatagttaccctcccaccttcggccaagggacacgactggagattaaa

SEQ ID NO: 162 - protein, 326 aa, Artificial Sequence
  Synthetic: IgG1-IgG2-IgG1f2 (MHCCR)
ASTKGPSVFPLAPSSKSTSGGTAALGCLVKDYFPEPVTVSWNSGALTSGVHTFPAVLQSSGLYSLSSVVTVPSSSLGTQTYICNVNHKPSNTKVDKKVERKCCVECPPCPAPPVAGPSVFLFPPKPKDTLMISRTPEVTCVVVDVSHEDPEVKFNWYVDGVEVHNAKTKPREEQYNSTYRVVSVLTVLHQDWLNGKEYKCKVSNKALPAPIEKTISKAKGQPREPQVYTLPPSREEMTKNQVSLTCLVKGFYPSDIAVEWESNGQPENNYKTTPPVLDSDGSFFLYSKLTVDKSRWQQGNVFSCSVMHEALHNHYTQKSLSLSPGK

SEQ ID NO: 163 - protein, 326 aa, Artificial Sequence
  Synthetic: IgG1-IgG2CS-IgG1f2 (MHCCR)
ASTKGPSVFPLAPSSKSTSGGTAALGCLVKDYFPEPVTVSWNSGALTSGVHTFPAVLQSSGLYSLSSVVTVPSSSLGTQTYICNVNHKPSNTKVDKKVERKSCVECPPCPAPPVAGPSVFLFPPKPKDTLMISRTPEVTCVVVDVSHEDPEVKFNWYVDGVEVHNAKTKPREEQYNSTYRVVSVLTVLHQDWLNGKEYKCKVSNKALPAPIEKTISKAKGQPREPQVYTLPPSREEMTKNQVSLTCLVKGFYPSDIAVEWESNGQPENNYKTTPPVLDSDGSFFLYSKLTVDKSRWQQGNVFSCSVMHEALHNHYTQKSLSLSPGK

SEQ ID NO: 164 - protein, 326 aa, Artificial Sequence
  Synthetic: IgG2-IgG1f2 (MHCCR)
ASTKGPSVFPLAPCSRSTSESTAALGCLVKDYFPEPVTVSWNSGALTSGVHTFPAVLQSSGLYSLSSVVTVPSSNFGTQTYTCNVDHKPSNTKVDKTVERKCCVECPPCPAPPVAGPSVFLFPPKPKDTLMISRTPEVTCVVVDVSHEDPEVKFNWYVDGVEVHNAKTKPREEQYNSTYRVVSVLTVLHQDWLNGKEYKCKVSNKALPAPIEKTISKAKGQPREPQVYTLPPSREEMTKNQVSLTCLVKGFYPSDIAVEWESNGQPENNYKTTPPVLDSDGSFFLYSKLTVDKSRWQQGNVFSCSVMHEALHNHYTQKSLSLSPGK

SEQ ID NO: 165 - protein, 326 aa, Artificial Sequence
  Synthetic: IgG2CS-IgG1f2 (MHCCR)
ASTKGPSVFPLAPCSRSTSESTAALGCLVKDYFPEPVTVSWNSGALTSGVHTFPAVLQSSGLYSLSSVVTVPSSNFGTQTYTCNVDHKPSNTKVDKTVERKSCVECPPCPAPPVAGPSVFLFPPKPKDTLMISRTPEVTCVVVDVSHEDPEVKFNWYVDGVEVHNAKTKPREEQYNSTYRVVSVLTVLHQDWLNGKEYKCKVSNKALPAPIEKTISKAKGQPREPQVYTLPPSREEMTKNQVSLTCLVKGFYPSDIAVEWESNGQPENNYKTTPPVLDSDGSFFLYSKLTVDKSRWQQGNVFSCSVMHEALHNHYTQKSLSLSPGK

SEQ ID NO: 166 - protein, 326 aa, Artificial Sequence
  Synthetic: IgG1-IgG2-IgG1.1f (MHCCR)
ASTKGPSVFPLAPSSKSTSGGTAALGCLVKDYFPEPVTVSWNSGALTSGVHTFPAVLQSSGLYSLSSVVTVPSSSLGTQTYICNVNHKPSNTKVDKKVERKCCVECPPCPAPPVAGPSVFLFPPKPKDTLMISRTPEVTCVVVDVSHEDPEVKFNWYVDGVEVHNAKTKPREEQYNSTYRVVSVLTVLHQDWLNGKEYKCKVSNKALPSSIEKTISKAKGQPREPQVYTLPPSREEMTKNQVSLTCLVKGFYPSDIAVEWESNGQPENNYKTTPPVLDSDGSFFLYSKLTVDKSRWQQGNVFSCSVMHEALHNHYTQKSLSLSPGK

SEQ ID NO: 167 - protein, 326 aa, Artificial Sequence
  Synthetic: IgG1-IgG2CS-IgG1.1f (MHCCR)
ASTKGPSVFPLAPSSKSTSGGTAALGCLVKDYFPEPVTVSWNSGALTSGVHTFPAVLQSSGLYSLSSVVTVPSSSLGTQTYICNVNHKPSNTKVDKKVERKSCVECPPCPAPPVAGPSVFLFPPKPKDTLMISRTPEVTCVVVDVSHEDPEVKFNWYVDGVEVHNAKTKPREEQYNSTYRVVSVLTVLHQDWLNGKEYKCKVSNKALPSSIEKTISKAKGQPREPQVYTLPPSREEMTKNQVSLTCLVKGFYPSDIAVEWESNGQPENNYKTTPPVLDSDGSFFLYSKLTVDKSRWQQGNVFSCSVMHEALHNHYTQKSLSLSPGK

SEQ ID NO: 168 - protein, 326 aa, Artificial Sequence
  Synthetic: IgG2-IgG1.1f (MHCCR)
ASTKGPSVFPLAPCSRSTSESTAALGCLVKDYFPEPVTVSWNSGALTSGVHTFPAVLQSSGLYSLSSVVTVPSSNFGTQTYTCNVDHKPSNTKVDKTVERKCCVECPPCPAPPVAGPSVFLFPPKPKDTLMISRTPEVTCVVVDVSHEDPEVKFNWYVDGVEVHNAKTKPREEQYNSTYRVVSVLTVLHQDWLNGKEYKCKVSNKALPSSIEKTISKAKGQPREPQVYTLPPSREEMTKNQVSLTCLVKGFYPSDIAVEWESNGQPENNYKTTPPVLDSDGSFFLYSKLTVDKSRWQQGNVFSCSVMHEALHNHYTQKSLSLSPGK

SEQ ID NO: 169 - protein, 326 aa, Artificial Sequence
  Synthetic: IgG2CS-IgG1.1f (MHCCR)
ASTKGPSVFPLAPCSRSTSESTAALGCLVKDYFPEPVTVSWNSGALTSGVHTFPAVLQSSGLYSLSSVVTVPSSNFGTQTYTCNVDHKPSNTKVDKTVERKSCVECPPCPAPPVAGPSVFLFPPKPKDTLMISRTPEVTCVVVDVSHEDPEVKFNWYVDGVEVHNAKTKPREEQYNSTYRVVSVLTVLHQDWLNGKEYKCKVSNKALPSSIEKTISKAKGQPREPQVYTLPPSREEMTKNQVSLTCLVKGFYPSDIAVEWESNGQPENNYKTTPPVLDSDGSFFLYSKLTVDKSRWQQGNVFSCSVMHEALHNHYTQKSLSLSPGK

SEQ ID NO: 170 - protein, 120 aa, Artificial Sequence
  Synthetic: CD73.3 VH (a.a)
EVQLVESGGGLVQPGRSLRLSCAASGFTFDDYAMHWVRQAPGKGLEWVSGISWKSGSIGYADSVKGRFTISRDNAKNSLYLQMNSLRAEDTVLYYCVKGYYVILTGLDYWGQGTLVTVSS

SEQ ID NO: 171 - protein, 121 aa, Artificial Sequence
  Synthetic: CD73.5 VH (a.a)
QVQLVESGGGVVQPGRSLRLSCASSGFTFSNYGMHWVRQAPGKGLEWVAVILYDGSNKYYPDSVKGRFTISRDNSKNTLYLQMNSLRAEDTAVYYCARGGSSWYPDSFDIWGQGTMVTVSS

SEQ ID NO: 172 - protein, 121 aa, Artificial Sequence
  Synthetic: CD73.6 VH (a.a)
QVQLVESGGGVVQPGRSLRLSCAASGFTFSNYGMHWVRQAPGKGLEWVAVILYDSSNKYYPDSVKGRFTISRDNSKNTLYLQMNSLRAEDTAVYYCARGGSSWYPDSFDIWGQGTMVTVSS

SEQ ID NO: 173 - protein, 121 aa, Artificial Sequence
  Synthetic: CD73.7 VH (a.a)
QVQLVESGGGVVQPGRSLRLSCASSGFTFSNYGMHWVRQAPGKGLEWVAVILYDSSNKYYPDSVKGRFTISRDNSKNTLYLQMNSLRAEDTAVYYCARGGSSWYPDSFDIWGQGTMVTVSS

SEQ ID NO: 174 - protein, 121 aa, Artificial Sequence
  Synthetic: CD73.8 VH (a.a)
QVQLVESGGGVVQPGRSLRLSCAASGFTFSNYGMHWVRQAPGKGLEWVAVIWYDSSNKYYPDSVKGRFTISRDNSKNTLYLQMNSLRAEDTAVYYCARGGSSWYPDSFDIWGQGTMVTVSS

SEQ ID NO: 175 - protein, 121 aa, Artificial Sequence
  Synthetic: CD73.9 VH (a.a)
QVQLVESGGGVVQPGRSLRLSCASSGFTFSNYGMHWVRQAPGKGLEWVAVIWYDSSNKYYPDSVKGRFTISRDNSKNTLYLQMNSLRAEDTAVYYCARGGSSWYPDSFDIWGQGTMVTVSS

SEQ ID NO: 176 - protein, 121 aa, Artificial Sequence
  Synthetic: CD73.10 VH (a.a)
QVQLVESGGGVVQPGRSLRLSCAASGFTFSNYGMHWVRQAPGKGLEWVAVIWYDESNKYYPDSVKGRFTISRDNSKNTLYLQMNSLRAEDTAVYYCARGGSSWYPDSFDIWGQGTMVTVSS

SEQ ID NO: 177 - protein, 122 aa, Artificial Sequence; identical to SEQ ID NO: 32
  Synthetic: CD73.11 VH (a.a)

SEQ ID NO: 178 - protein, 19 aa, Artificial Sequence
  Synthetic: IgG2/IgG1 hybrid hinge
ERKCCVECPPCPAPELLGG

SEQ ID NO: 179 - protein, 19 aa, Artificial Sequence
  Synthetic: IgG2 C219S/IgG1 hybrid hinge
ERKSCVECPPCPAPELLGG

SEQ ID NO: 180 - protein, 327 aa, Artificial Sequence
  Synthetic: IgG1-IgG2-IgG1f
ASTKGPSVFPLAPSSKSTSGGTAALGCLVKDYFPEPVTVSWNSGALTSGVHTFPAVLQSSGLYSLSSVVTVPSSSLGTQTYICNVNHKPSNTKVDKKVERKCCVECPPCPAPELLGGPSVFLFPPKPKDTLMISRTPEVTCVVVDVSHEDPEVKFNWYVDGVEVHNAKTKPREEQYNSTYRVVSVLTVLHQDWLNGKEYKCKVSNKALPAPIEKTISKAKGQPREPQVYTLPPSREEMTKNQVSLTCLVKGFYPSDIAVEWESNGQPENNYKTTPPVLDSDGSFFLYSKLTVDKSRWQQGNVFSCSVMHEALHNHYTQKSLSLSPGK

SEQ ID NO: 181 - protein, 327 aa, Artificial Sequence
  Synthetic: IgG1-IgG2CS-IgG1f
ASTKGPSVFPLAPSSKSTSGGTAALGCLVKDYFPEPVTVSWNSGALTSGVHTFPAVLQSSGLYSLSSVVTVPSSSLGTQTYICNVNHKPSNTKVDKKVERKSCVECPPCPAPELLGGPSVFLFPPKPKDTLMISRTPEVTCVVVDVSHEDPEVKFNWYVDGVEVHNAKTKPREEQYNSTYRVVSVLTVLHQDWLNGKEYKCKVSNKALPAPIEKTISKAKGQPREPQVYTLPPSREEMTKNQVSLTCLVKGFYPSDIAVEWESNGQPENNYKTTPPVLDSDGSFFLYSKLTVDKSRWQQGNVFSCSVMHEALHNHYTQKSLSLSPGK

SEQ ID NO: 182 - protein, 327 aa, Artificial Sequence
  Synthetic: IgG2-IgG1f
ASTKGPSVFPLAPCSRSTSESTAALGCLVKDYFPEPVTVSWNSGALTSGVHTFPAVLQSSGLYSLSSVVTVPSSNFGTQTYTCNVDHKPSNTKVDKTVERKCCVECPPCPAPELLGGPSVFLFPPKPKDTLMISRTPEVTCVVVDVSHEDPEVKFNWYVDGVEVHNAKTKPREEQYNSTYRVVSVLTVLHQDWLNGKEYKCKVSNKALPAPIEKTISKAKGQPREPQVYTLPPSREEMTKNQVSLTCLVKGFYPSDIAVEWESNGQPENNYKTTPPVLDSDGSFFLYSKLTVDKSRWQQGNVFSCSVMHEALHNHYTQKSLSLSPGK

SEQ ID NO: 183 - protein, 327 aa, Artificial Sequence
  Synthetic: IgG2CS-IgG1f
ASTKGPSVFPLAPCSRSTSESTAALGCLVKDYFPEPVTVSWNSGALTSGVHTFPAVLQSSGLYSLSSVVTVPSSNFGTQTYTCNVDHKPSNTKVDKTVERKSCVECPPCPAPELLGGPSVFLFPPKPKDTLMISRTPEVTCVVVDVSHEDPEVKFNWYVDGVEVHNAKTKPREEQYNSTYRVVSVLTVLHQDWLNGKEYKCKVSNKALPAPIEKTISKAKGQPREPQVYTLPPSREEMTKNQVSLTCLVKGFYPSDIAVEWESNGQPENNYKTTPPVLDSDGSFFLYSKLTVDKSRWQQGNVFSCSVMHEALHNHYTQKSLSLSPGK

SEQ ID NO: 184 - protein, 449 aa, Artificial Sequence
  Synthetic: mAb-CD73.3-Vh-hHC-IgG1.1f
EVQLVESGGGLVQPGRSLRLSCAASGFTFDDYAMHWVRQAPGKGLEWVSGISWKSGSIGYADSVKGRFTISRDNAKNSLYLQMNSLRAEDTALYYCAKGYYVILTGLDYWGQGTLVTVSSASTKGPSVFPLAPSSKSTSGGTAALGCLVKDYFPEPVTVSWNSGALTSGVHTFPAVLQSSGLYSLSSVVTVPSSSLGTQTYICNVNHKPSNTKVDKRVEPKSCDKTHTCPPCPAPEAEGAPSVFLFPPKPKDTLMISRTPEVTCVVVDVSHEDPEVKFNWYVDGVEVHNAKTKPREEQYNSTYRVVSVLTVLHQDWLNGKEYKCKVSNKALPSSIEKTISKAKGQPREPQVYTLPPSREEMTKNQVSLTCLVKGFYPSDIAVEWESNGQPENNYKTTPPVLDSDGSFFLYSKLTVDKSRWQQGNVFSCSVMHEALHNHYTQKSLSLSPG

SEQ ID NO: 185 - protein, 445 aa, Artificial Sequence
  Synthetic: mAb-CD73.3-Vh-hHC-IgG2-C219S
EVQLVESGGGLVQPGRSLRLSCAASGFTFDDYAMHWVRQAPGKGLEWVSGISWKSGSIGYADSVKGRFTISRDNAKNSLYLQMNSLRAEDTALYYCAKGYYVILTGLDYWGQGTLVTVSSASTKGPSVFPLAPCSRSTSESTAALGCLVKDYFPEPVTVSWNSGALTSGVHTFPAVLQSSGLYSLSSVVTVPSSNFGTQTYTCNVDHKPSNTKVDKTVERKSCVECPPCPAPPVAGPSVFLFPPKPKDTLMISRTPEVTCVVVDVSHEDPEVQFNWYVDGVEVHNAKTKPREEQFNSTFRVVSVLTVVHQDWLNGKEYKCKVSNKGLPAPIEKTISKTKGQPREPQVYTLPPSREEMTKNQVSLTCLVKGFYPSDIAVEWESNGQPENNYKTTPPMLDSDGSFFLYSKLTVDKSRWQQGNVFSCSVMHEALHNHYTQKSLSLSPG

SEQ ID NO: 186 - protein, 445 aa, Artificial Sequence
  Synthetic: mAb-CD73.3-Vh-hHC-IgG2-C219S-IgG1.1f
EVQLVESGGGLVQPGRSLRLSCAASGFTFDDYAMHWVRQAPGKGLEWVSGISWKSGSIGYADSVKGRFTISRDNAKNSLYLQMNSLRAEDTALYYCAKGYYVILTGLDYWGQGTLVTVSSASTKGPSVFPLAPCSRSTSESTAALGCLVKDYFPEPVTVSWNSGALTSGVHTFPAVLQSSGLYSLSSVVTVPSSNFGTQTYTCNVDHKPSNTKVDKTVERKSCVECPPCPAPPVAGPSVFLFPPKPKDTLMISRTPEVTCVVVDVSHEDPEVKFNWYVDGVEVHNAKTKPREEQYNSTYRVVSVLTVLHQDWLNGKEYKCKVSNKALPSSIEKTISKAKGQPREPQVYTLPPSREEMTKNQVSLTCLVKGFYPSDIAVEWESNGQPENNYKTTPPVLDSDGSFFLYSKLTVDKSRWQQGNVFSCSVMHEALHNHYTQKSLSLSPG

SEQ ID NO: 187 - protein, 450 aa, Artificial Sequence
  Synthetic: mAb-CD73.4-Vh-hHC-IgG1.1f
QVQLVESGGGVVQPGRSLRLSCAASGFTFSNYGMHWVRQAPGKGLEWVAVILYDGSNKYYPDSVKGRFTISRDNSKNTLYLQMNSLRAEDTAVYYCARGGSSWYPDSFDIWGQGTMVTVSSASTKGPSVFPLAPSSKSTSGGTAALGCLVKDYFPEPVTVSWNSGALTSGVHTFPAVLQSSGLYSLSSVVTVPSSSLGTQTYICNVNHKPSNTKVDKRVEPKSCDKTHTCPPCPAPEAEGAPSVFLFPPKPKDTLMISRTPEVTCVVVDVSHEDPEVKFNWYVDGVEVHNAKTKPREEQYNSTYRVVSVLTVLHQDWLNGKEYKCKVSNKALPSSIEKTISKAKGQPREPQVYTLPPSREEMTKNQVSLTCLVKGFYPSDIAVEWESNGQPENNYKTTPPVLDSDGSFFLYSKLTVDKSRWQQGNVFSCSVMHEALHNHYTQKSLSLSPG

SEQ ID NO: 188 - protein, 446 aa, Artificial Sequence
  Synthetic: mAb-CD73.4-Vh-hHC-IgG2-C219S
QVQLVESGGGVVQPGRSLRLSCAASGFTFSNYGMHWVRQAPGKGLEWVAVILYDGSNKYYPDSVKGRFTISRDNSKNTLYLQMNSLRAEDTAVYYCARGGSSWYPDSFDIWGQGTMVTVSSASTKGPSVFPLAPCSRSTSESTAALGCLVKDYFPEPVTVSWNSGALTSGVHTFPAVLQSSGLYSLSSVVTVPSSNFGTQTYTCNVDHKPSNTKVDKTVERKSCVECPPCPAPPVAGPSVFLFPPKPKDTLMISRTPEVTCVVVDVSHEDPEVQFNWYVDGVEVHNAKTKPREEQFNSTFRVVSVLTVVHQDWLNGKEYKCKVSNKGLPAPIEKTISKTKGQPREPQVYTLPPSREEMTKNQVSLTCLVKGFYPSDIAVEWESNGQPENNYKTTPPMLDSDGSFFLYSKLTVDKSRWQQGNVFSCSVMHEALHNHYTQKSLSLSPG

SEQ ID NO: 189 - protein, 446 aa, Artificial Sequence
  Synthetic: mAb-CD73.4-Vh-hHC-IgG2-C219S-IgG1.1f  (identical to SEQ ID NO: 133, except lacks C-terminal lysine)
QVQLVESGGGVVQPGRSLRLSCAASGFTFSNYGMHWVRQAPGKGLEWVAVILYDGSNKYYPDSVKGRFTISRDNSKNTLYLQMNSLRAEDTAVYYCARGGSSWYPDSFDIWGQGTMVTVSSASTKGPSVFPLAPCSRSTSESTAALGCLVKDYFPEPVTVSWNSGALTSGVHTFPAVLQSSGLYSLSSVVTVPSSNFGTQTYTCNVDHKPSNTKVDKTVERKSCVECPPCPAPPVAGPSVFLFPPKPKDTLMISRTPEVTCVVVDVSHEDPEVKFNWYVDGVEVHNAKTKPREEQYNSTYRVVSVLTVLHQDWLNGKEYKCKVSNKALPSSIEKTISKAKGQPREPQVYTLPPSREEMTKNQVSLTCLVKGFYPSDIAVEWESNGQPENNYKTTPPVLDSDGSFFLYSKLTVDKSRWQQGNVFSCSVMHEALHNHYTQKSLSLSPG

SEQ ID NO: 190 - protein, 450 aa, Artificial Sequence
  Synthetic: mAb-CD73.5-Vh-hHC-IgG1.1f
QVQLVESGGGVVQPGRSLRLSCASSGFTFSNYGMHWVRQAPGKGLEWVAVILYDGSNKYYPDSVKGRFTISRDNSKNTLYLQMNSLRAEDTAVYYCARGGSSWYPDSFDIWGQGTMVTVSSASTKGPSVFPLAPSSKSTSGGTAALGCLVKDYFPEPVTVSWNSGALTSGVHTFPAVLQSSGLYSLSSVVTVPSSSLGTQTYICNVNHKPSNTKVDKRVEPKSCDKTHTCPPCPAPEAEGAPSVFLFPPKPKDTLMISRTPEVTCVVVDVSHEDPEVKFNWYVDGVEVHNAKTKPREEQYNSTYRVVSVLTVLHQDWLNGKEYKCKVSNKALPSSIEKTISKAKGQPREPQVYTLPPSREEMTKNQVSLTCLVKGFYPSDIAVEWESNGQPENNYKTTPPVLDSDGSFFLYSKLTVDKSRWQQGNVFSCSVMHEALHNHYTQKSLSLSPG

SEQ ID NO: 191 - protein, 446 aa, Artificial Sequence
  Synthetic: mAb-CD73.5-Vh-hHC-IgG2-C219S
QVQLVESGGGVVQPGRSLRLSCASSGFTFSNYGMHWVRQAPGKGLEWVAVILYDGSNKYYPDSVKGRFTISRDNSKNTLYLQMNSLRAEDTAVYYCARGGSSWYPDSFDIWGQGTMVTVSSASTKGPSVFPLAPCSRSTSESTAALGCLVKDYFPEPVTVSWNSGALTSGVHTFPAVLQSSGLYSLSSVVTVPSSNFGTQTYTCNVDHKPSNTKVDKTVERKSCVECPPCPAPPVAGPSVFLFPPKPKDTLMISRTPEVTCVVVDVSHEDPEVQFNWYVDGVEVHNAKTKPREEQFNSTFRVVSVLTVVHQDWLNGKEYKCKVSNKGLPAPIEKTISKTKGQPREPQVYTLPPSREEMTKNQVSLTCLVKGFYPSDIAVEWESNGQPENNYKTTPPMLDSDGSFFLYSKLTVDKSRWQQGNVFSCSVMHEALHNHYTQKSLSLSPG

SEQ ID NO: 192 - protein, 446 aa, Artificial Sequence
  Synthetic: mAb-CD73.5-Vh-hHC-IgG2-C219S-IgG1.1f
QVQLVESGGGVVQPGRSLRLSCASSGFTFSNYGMHWVRQAPGKGLEWVAVILYDGSNKYYPDSVKGRFTISRDNSKNTLYLQMNSLRAEDTAVYYCARGGSSWYPDSFDIWGQGTMVTVSSASTKGPSVFPLAPCSRSTSESTAALGCLVKDYFPEPVTVSWNSGALTSGVHTFPAVLQSSGLYSLSSVVTVPSSNFGTQTYTCNVDHKPSNTKVDKTVERKSCVECPPCPAPPVAGPSVFLFPPKPKDTLMISRTPEVTCVVVDVSHEDPEVKFNWYVDGVEVHNAKTKPREEQYNSTYRVVSVLTVLHQDWLNGKEYKCKVSNKALPSSIEKTISKAKGQPREPQVYTLPPSREEMTKNQVSLTCLVKGFYPSDIAVEWESNGQPENNYKTTPPVLDSDGSFFLYSKLTVDKSRWQQGNVFSCSVMHEALHNHYTQKSLSLSPG

SEQ ID NO: 193 - protein, 450 aa, Artificial Sequence
  Synthetic: mAb-CD73.6-Vh-hHC-IgG1.1f
QVQLVESGGGVVQPGRSLRLSCAASGFTFSNYGMHWVRQAPGKGLEWVAVILYDSSNKYYPDSVKGRFTISRDNSKNTLYLQMNSLRAEDTAVYYCARGGSSWYPDSFDIWGQGTMVTVSSASTKGPSVFPLAPSSKSTSGGTAALGCLVKDYFPEPVTVSWNSGALTSGVHTFPAVLQSSGLYSLSSVVTVPSSSLGTQTYICNVNHKPSNTKVDKRVEPKSCDKTHTCPPCPAPEAEGAPSVFLFPPKPKDTLMISRTPEVTCVVVDVSHEDPEVKFNWYVDGVEVHNAKTKPREEQYNSTYRVVSVLTVLHQDWLNGKEYKCKVSNKALPSSIEKTISKAKGQPREPQVYTLPPSREEMTKNQVSLTCLVKGFYPSDIAVEWESNGQPENNYKTTPPVLDSDGSFFLYSKLTVDKSRWQQGNVFSCSVMHEALHNHYTQKSLSLSPG

SEQ ID NO: 194 - protein, 446 aa, Artificial Sequence
  Synthetic: mAb-CD73.6-Vh-hHC-IgG2-C219S
QVQLVESGGGVVQPGRSLRLSCAASGFTFSNYGMHWVRQAPGKGLEWVAVILYDSSNKYYPDSVKGRFTISRDNSKNTLYLQMNSLRAEDTAVYYCARGGSSWYPDSFDIWGQGTMVTVSSASTKGPSVFPLAPCSRSTSESTAALGCLVKDYFPEPVTVSWNSGALTSGVHTFPAVLQSSGLYSLSSVVTVPSSNFGTQTYTCNVDHKPSNTKVDKTVERKSCVECPPCPAPPVAGPSVFLFPPKPKDTLMISRTPEVTCVVVDVSHEDPEVQFNWYVDGVEVHNAKTKPREEQFNSTFRVVSVLTVVHQDWLNGKEYKCKVSNKGLPAPIEKTISKTKGQPREPQVYTLPPSREEMTKNQVSLTCLVKGFYPSDIAVEWESNGQPENNYKTTPPMLDSDGSFFLYSKLTVDKSRWQQGNVFSCSVMHEALHNHYTQKSLSLSPG

SEQ ID NO: 195 - protein, 447 aa, Artificial Sequence
  Synthetic: mAb-CD73.6-Vh-hHC-IgG2-C219S-IgG1.1f
QVQLVESGGGVVQPGRSLRLSCAASGFTFSNYGMHWVRQAPGKGLEWVAVILYDSSNKYYPDSVKGRFTISRDNSKNTLYLQMNSLRAEDTAVYYCARGGSSWYPDSFDIWGQGTMVTVSSASTKGPSVFPLAPCSRSTSESTAALGCLVKDYFPEPVTVSWNSGALTSGVHTFPAVLQSSGLYSLSSVVTVPSSNFGTQTYTCNVDHKPSNTKVDKTVERKSCVECPPCPAPPVAGPSVFLFPPKPKDTLMISRTPEVTCVVVDVSHEDPEVKFNWYVDGVEVHNAKTKPREEQYNSTYRVVSVLTVLHQDWLNGKEYKCKVSNKALPSSIEKTISKAKGQPREPQVYTLPPSREEMTKNQVSLTCLVKGFYPSDIAVEWESNGQPENNYKTTPPVLDSDGSFFLYSKLTVDKSRWQQGNVFSCSVMHEALHNHYTQKSLSLSPGK

SEQ ID NO: 196 - protein, 450 aa, Artificial Sequence
  Synthetic: mAb-CD73.7-Vh-hHC-IgG1.1f
QVQLVESGGGVVQPGRSLRLSCASSGFTFSNYGMHWVRQAPGKGLEWVAVILYDSSNKYYPDSVKGRFTISRDNSKNTLYLQMNSLRAEDTAVYYCARGGSSWYPDSFDIWGQGTMVTVSSASTKGPSVFPLAPSSKSTSGGTAALGCLVKDYFPEPVTVSWNSGALTSGVHTFPAVLQSSGLYSLSSVVTVPSSSLGTQTYICNVNHKPSNTKVDKRVEPKSCDKTHTCPPCPAPEAEGAPSVFLFPPKPKDTLMISRTPEVTCVVVDVSHEDPEVKFNWYVDGVEVHNAKTKPREEQYNSTYRVVSVLTVLHQDWLNGKEYKCKVSNKALPSSIEKTISKAKGQPREPQVYTLPPSREEMTKNQVSLTCLVKGFYPSDIAVEWESNGQPENNYKTTPPVLDSDGSFFLYSKLTVDKSRWQQGNVFSCSVMHEALHNHYTQKSLSLSPG

SEQ ID NO: 197 - protein, 446 aa, Artificial Sequence
  Synthetic: mAb-CD73.7-Vh-hHC-IgG2-C219S
QVQLVESGGGVVQPGRSLRLSCASSGFTFSNYGMHWVRQAPGKGLEWVAVILYDSSNKYYPDSVKGRFTISRDNSKNTLYLQMNSLRAEDTAVYYCARGGSSWYPDSFDIWGQGTMVTVSSASTKGPSVFPLAPCSRSTSESTAALGCLVKDYFPEPVTVSWNSGALTSGVHTFPAVLQSSGLYSLSSVVTVPSSNFGTQTYTCNVDHKPSNTKVDKTVERKSCVECPPCPAPPVAGPSVFLFPPKPKDTLMISRTPEVTCVVVDVSHEDPEVQFNWYVDGVEVHNAKTKPREEQFNSTFRVVSVLTVVHQDWLNGKEYKCKVSNKGLPAPIEKTISKTKGQPREPQVYTLPPSREEMTKNQVSLTCLVKGFYPSDIAVEWESNGQPENNYKTTPPMLDSDGSFFLYSKLTVDKSRWQQGNVFSCSVMHEALHNHYTQKSLSLSPG

SEQ ID NO: 198 - protein, 446 aa, Artificial Sequence
  Synthetic: mAb-CD73.7-Vh-hHC-IgG2-C219S-IgG1.1f
QVQLVESGGGVVQPGRSLRLSCASSGFTFSNYGMHWVRQAPGKGLEWVAVILYDSSNKYYPDSVKGRFTISRDNSKNTLYLQMNSLRAEDTAVYYCARGGSSWYPDSFDIWGQGTMVTVSSASTKGPSVFPLAPCSRSTSESTAALGCLVKDYFPEPVTVSWNSGALTSGVHTFPAVLQSSGLYSLSSVVTVPSSNFGTQTYTCNVDHKPSNTKVDKTVERKSCVECPPCPAPPVAGPSVFLFPPKPKDTLMISRTPEVTCVVVDVSHEDPEVKFNWYVDGVEVHNAKTKPREEQYNSTYRVVSVLTVLHQDWLNGKEYKCKVSNKALPSSIEKTISKAKGQPREPQVYTLPPSREEMTKNQVSLTCLVKGFYPSDIAVEWESNGQPENNYKTTPPVLDSDGSFFLYSKLTVDKSRWQQGNVFSCSVMHEALHNHYTQKSLSLSPG

SEQ ID NO: 199 - protein, 450 aa, Artificial Sequence
  Synthetic: mAb-CD73.8-Vh-hHC-IgG1.1f
QVQLVESGGGVVQPGRSLRLSCAASGFTFSNYGMHWVRQAPGKGLEWVAVIWYDSSNKYYPDSVKGRFTISRDNSKNTLYLQMNSLRAEDTAVYYCARGGSSWYPDSFDIWGQGTMVTVSSASTKGPSVFPLAPSSKSTSGGTAALGCLVKDYFPEPVTVSWNSGALTSGVHTFPAVLQSSGLYSLSSVVTVPSSSLGTQTYICNVNHKPSNTKVDKRVEPKSCDKTHTCPPCPAPEAEGAPSVFLFPPKPKDTLMISRTPEVTCVVVDVSHEDPEVKFNWYVDGVEVHNAKTKPREEQYNSTYRVVSVLTVLHQDWLNGKEYKCKVSNKALPSSIEKTISKAKGQPREPQVYTLPPSREEMTKNQVSLTCLVKGFYPSDIAVEWESNGQPENNYKTTPPVLDSDGSFFLYSKLTVDKSRWQQGNVFSCSVMHEALHNHYTQKSLSLSPG

SEQ ID NO: 200 - protein, 446 aa, Artificial Sequence
  Synthetic: mAb-CD73.8-Vh-hHC-IgG2-C219S
QVQLVESGGGVVQPGRSLRLSCAASGFTFSNYGMHWVRQAPGKGLEWVAVIWYDSSNKYYPDSVKGRFTISRDNSKNTLYLQMNSLRAEDTAVYYCARGGSSWYPDSFDIWGQGTMVTVSSASTKGPSVFPLAPCSRSTSESTAALGCLVKDYFPEPVTVSWNSGALTSGVHTFPAVLQSSGLYSLSSVVTVPSSNFGTQTYTCNVDHKPSNTKVDKTVERKSCVECPPCPAPPVAGPSVFLFPPKPKDTLMISRTPEVTCVVVDVSHEDPEVQFNWYVDGVEVHNAKTKPREEQFNSTFRVVSVLTVVHQDWLNGKEYKCKVSNKGLPAPIEKTISKTKGQPREPQVYTLPPSREEMTKNQVSLTCLVKGFYPSDIAVEWESNGQPENNYKTTPPMLDSDGSFFLYSKLTVDKSRWQQGNVFSCSVMHEALHNHYTQKSLSLSPG

SEQ ID NO: 201 - protein, 446 aa, Artificial Sequence
  Synthetic: mAb-CD73.8-Vh-hHC-IgG2-C219S-IgG1.1f
QVQLVESGGGVVQPGRSLRLSCAASGFTFSNYGMHWVRQAPGKGLEWVAVIWYDSSNKYYPDSVKGRFTISRDNSKNTLYLQMNSLRAEDTAVYYCARGGSSWYPDSFDIWGQGTMVTVSSASTKGPSVFPLAPCSRSTSESTAALGCLVKDYFPEPVTVSWNSGALTSGVHTFPAVLQSSGLYSLSSVVTVPSSNFGTQTYTCNVDHKPSNTKVDKTVERKSCVECPPCPAPPVAGPSVFLFPPKPKDTLMISRTPEVTCVVVDVSHEDPEVKFNWYVDGVEVHNAKTKPREEQYNSTYRVVSVLTVLHQDWLNGKEYKCKVSNKALPSSIEKTISKAKGQPREPQVYTLPPSREEMTKNQVSLTCLVKGFYPSDIAVEWESNGQPENNYKTTPPVLDSDGSFFLYSKLTVDKSRWQQGNVFSCSVMHEALHNHYTQKSLSLSPG

SEQ ID NO: 202 - protein, 450 aa, Artificial Sequence
  Synthetic: mAb-CD73.9-Vh-hHC-IgG1.1f
QVQLVESGGGVVQPGRSLRLSCASSGFTFSNYGMHWVRQAPGKGLEWVAVIWYDSSNKYYPDSVKGRFTISRDNSKNTLYLQMNSLRAEDTAVYYCARGGSSWYPDSFDIWGQGTMVTVSSASTKGPSVFPLAPSSKSTSGGTAALGCLVKDYFPEPVTVSWNSGALTSGVHTFPAVLQSSGLYSLSSVVTVPSSSLGTQTYICNVNHKPSNTKVDKRVEPKSCDKTHTCPPCPAPEAEGAPSVFLFPPKPKDTLMISRTPEVTCVVVDVSHEDPEVKFNWYVDGVEVHNAKTKPREEQYNSTYRVVSVLTVLHQDWLNGKEYKCKVSNKALPSSIEKTISKAKGQPREPQVYTLPPSREEMTKNQVSLTCLVKGFYPSDIAVEWESNGQPENNYKTTPPVLDSDGSFFLYSKLTVDKSRWQQGNVFSCSVMHEALHNHYTQKSLSLSPG

SEQ ID NO: 203 - protein, 446 aa, Artificial Sequence
  Synthetic: mAb-CD73.9-Vh-hHC-IgG2-C219S
QVQLVESGGGVVQPGRSLRLSCASSGFTFSNYGMHWVRQAPGKGLEWVAVIWYDSSNKYYPDSVKGRFTISRDNSKNTLYLQMNSLRAEDTAVYYCARGGSSWYPDSFDIWGQGTMVTVSSASTKGPSVFPLAPCSRSTSESTAALGCLVKDYFPEPVTVSWNSGALTSGVHTFPAVLQSSGLYSLSSVVTVPSSNFGTQTYTCNVDHKPSNTKVDKTVERKSCVECPPCPAPPVAGPSVFLFPPKPKDTLMISRTPEVTCVVVDVSHEDPEVQFNWYVDGVEVHNAKTKPREEQFNSTFRVVSVLTVVHQDWLNGKEYKCKVSNKGLPAPIEKTISKTKGQPREPQVYTLPPSREEMTKNQVSLTCLVKGFYPSDIAVEWESNGQPENNYKTTPPMLDSDGSFFLYSKLTVDKSRWQQGNVFSCSVMHEALHNHYTQKSLSLSPG

SEQ ID NO: 204 - protein, 446 aa, Artificial Sequence
  Synthetic: mAb-CD73.9-Vh-hHC-IgG2-C219S-IgG1.1f
QVQLVESGGGVVQPGRSLRLSCASSGFTFSNYGMHWVRQAPGKGLEWVAVIWYDSSNKYYPDSVKGRFTISRDNSKNTLYLQMNSLRAEDTAVYYCARGGSSWYPDSFDIWGQGTMVTVSSASTKGPSVFPLAPCSRSTSESTAALGCLVKDYFPEPVTVSWNSGALTSGVHTFPAVLQSSGLYSLSSVVTVPSSNFGTQTYTCNVDHKPSNTKVDKTVERKSCVECPPCPAPPVAGPSVFLFPPKPKDTLMISRTPEVTCVVVDVSHEDPEVKFNWYVDGVEVHNAKTKPREEQYNSTYRVVSVLTVLHQDWLNGKEYKCKVSNKALPSSIEKTISKAKGQPREPQVYTLPPSREEMTKNQVSLTCLVKGFYPSDIAVEWESNGQPENNYKTTPPVLDSDGSFFLYSKLTVDKSRWQQGNVFSCSVMHEALHNHYTQKSLSLSPG

SEQ ID NO: 205 - protein, 450 aa, Artificial Sequence
  Synthetic: mAb-CD73.10-Vh-hHC-IgG1.1f
QVQLVESGGGVVQPGRSLRLSCAASGFTFSNYGMHWVRQAPGKGLEWVAVIWYDESNKYYPDSVKGRFTISRDNSKNTLYLQMNSLRAEDTAVYYCARGGSSWYPDSFDIWGQGTMVTVSSASTKGPSVFPLAPSSKSTSGGTAALGCLVKDYFPEPVTVSWNSGALTSGVHTFPAVLQSSGLYSLSSVVTVPSSSLGTQTYICNVNHKPSNTKVDKRVEPKSCDKTHTCPPCPAPEAEGAPSVFLFPPKPKDTLMISRTPEVTCVVVDVSHEDPEVKFNWYVDGVEVHNAKTKPREEQYNSTYRVVSVLTVLHQDWLNGKEYKCKVSNKALPSSIEKTISKAKGQPREPQVYTLPPSREEMTKNQVSLTCLVKGFYPSDIAVEWESNGQPENNYKTTPPVLDSDGSFFLYSKLTVDKSRWQQGNVFSCSVMHEALHNHYTQKSLSLSPG

SEQ ID NO: 206 - protein, 446 aa, Artificial Sequence
  Synthetic: mAb-CD73.10-Vh-hHC-IgG2-C219S
QVQLVESGGGVVQPGRSLRLSCAASGFTFSNYGMHWVRQAPGKGLEWVAVIWYDESNKYYPDSVKGRFTISRDNSKNTLYLQMNSLRAEDTAVYYCARGGSSWYPDSFDIWGQGTMVTVSSASTKGPSVFPLAPCSRSTSESTAALGCLVKDYFPEPVTVSWNSGALTSGVHTFPAVLQSSGLYSLSSVVTVPSSNFGTQTYTCNVDHKPSNTKVDKTVERKSCVECPPCPAPPVAGPSVFLFPPKPKDTLMISRTPEVTCVVVDVSHEDPEVQFNWYVDGVEVHNAKTKPREEQFNSTFRVVSVLTVVHQDWLNGKEYKCKVSNKGLPAPIEKTISKTKGQPREPQVYTLPPSREEMTKNQVSLTCLVKGFYPSDIAVEWESNGQPENNYKTTPPMLDSDGSFFLYSKLTVDKSRWQQGNVFSCSVMHEALHNHYTQKSLSLSPG

SEQ ID NO: 207 - protein, 446 aa, Artificial Sequence
  Synthetic: mAb-CD73.10-Vh-hHC-IgG2-C219S-IgG1.1f
QVQLVESGGGVVQPGRSLRLSCAASGFTFSNYGMHWVRQAPGKGLEWVAVIWYDESNKYYPDSVKGRFTISRDNSKNTLYLQMNSLRAEDTAVYYCARGGSSWYPDSFDIWGQGTMVTVSSASTKGPSVFPLAPCSRSTSESTAALGCLVKDYFPEPVTVSWNSGALTSGVHTFPAVLQSSGLYSLSSVVTVPSSNFGTQTYTCNVDHKPSNTKVDKTVERKSCVECPPCPAPPVAGPSVFLFPPKPKDTLMISRTPEVTCVVVDVSHEDPEVKFNWYVDGVEVHNAKTKPREEQYNSTYRVVSVLTVLHQDWLNGKEYKCKVSNKALPSSIEKTISKAKGQPREPQVYTLPPSREEMTKNQVSLTCLVKGFYPSDIAVEWESNGQPENNYKTTPPVLDSDGSFFLYSKLTVDKSRWQQGNVFSCSVMHEALHNHYTQKSLSLSPG

SEQ ID NO: 208 - protein, 451 aa, Artificial Sequence
  Synthetic: mAb-CD73.11-Vh-hHC-IgG1.1f
QVQLVESGGGVVQPGRSLRLSCAASGFTFSNYGMHWVRQAPGKGLEWVAVIWYDESNKYYADSVKGRFTISRDNSKNTLFLQMNSLRAEDTAVYYCARGYNSRWYPDAFDIWGQGTMVTVSSASTKGPSVFPLAPSSKSTSGGTAALGCLVKDYFPEPVTVSWNSGALTSGVHTFPAVLQSSGLYSLSSVVTVPSSSLGTQTYICNVNHKPSNTKVDKRVEPKSCDKTHTCPPCPAPEAEGAPSVFLFPPKPKDTLMISRTPEVTCVVVDVSHEDPEVKFNWYVDGVEVHNAKTKPREEQYNSTYRVVSVLTVLHQDWLNGKEYKCKVSNKALPSSIEKTISKAKGQPREPQVYTLPPSREEMTKNQVSLTCLVKGFYPSDIAVEWESNGQPENNYKTTPPVLDSDGSFFLYSKLTVDKSRWQQGNVFSCSVMHEALHNHYTQKSLSLSPG

SEQ ID NO: 209 - protein, 447 aa, Artificial Sequence
  Synthetic: mAb-CD73.11-Vh-hHC-IgG2-C219S
QVQLVESGGGVVQPGRSLRLSCAASGFTFSNYGMHWVRQAPGKGLEWVAVIWYDESNKYYADSVKGRFTISRDNSKNTLFLQMNSLRAEDTAVYYCARGYNSRWYPDAFDIWGQGTMVTVSSASTKGPSVFPLAPCSRSTSESTAALGCLVKDYFPEPVTVSWNSGALTSGVHTFPAVLQSSGLYSLSSVVTVPSSNFGTQTYTCNVDHKPSNTKVDKTVERKSCVECPPCPAPPVAGPSVFLFPPKPKDTLMISRTPEVTCVVVDVSHEDPEVQFNWYVDGVEVHNAKTKPREEQFNSTFRVVSVLTVVHQDWLNGKEYKCKVSNKGLPAPIEKTISKTKGQPREPQVYTLPPSREEMTKNQVSLTCLVKGFYPSDIAVEWESNGQPENNYKTTPPMLDSDGSFFLYSKLTVDKSRWQQGNVFSCSVMHEALHNHYTQKSLSLSPG

SEQ ID NO: 210 - protein, 447 aa, Artificial Sequence
  Synthetic: mAb-CD73.11-Vh-hHC-IgG2-C219S-IgG1.1f
QVQLVESGGGVVQPGRSLRLSCAASGFTFSNYGMHWVRQAPGKGLEWVAVIWYDESNKYYADSVKGRFTISRDNSKNTLFLQMNSLRAEDTAVYYCARGYNSRWYPDAFDIWGQGTMVTVSSASTKGPSVFPLAPCSRSTSESTAALGCLVKDYFPEPVTVSWNSGALTSGVHTFPAVLQSSGLYSLSSVVTVPSSNFGTQTYTCNVDHKPSNTKVDKTVERKSCVECPPCPAPPVAGPSVFLFPPKPKDTLMISRTPEVTCVVVDVSHEDPEVKFNWYVDGVEVHNAKTKPREEQYNSTYRVVSVLTVLHQDWLNGKEYKCKVSNKALPSSIEKTISKAKGQPREPQVYTLPPSREEMTKNQVSLTCLVKGFYPSDIAVEWESNGQPENNYKTTPPVLDSDGSFFLYSKLTVDKSRWQQGNVFSCSVMHEALHNHYTQKSLSLSPG

SEQ ID NO: 211 - DNA, 1347 bp, Artificial Sequence
  Synthetic: mAb-CD73.3-Vh-hHC-IgG1.1f
gaagtgcagctggtggagtctgggggaggcttggtacagcctggcaggtccctgagactctcctgtgcagcctctggattcacctttgatgattatgccatgcactgggtccggcaagctccagggaagggcctggagtgggtctcaggtattagttggaagagtggtagcataggctatgcggactctgtgaagggccgattcaccatctccagagacaacgccaagaactccctgtatctgcaaatgaacagtctgagagctgaggacacggccttgtattactgtgccaaagggtattacgttattttgactggccttgactactggggccagggaaccctggtcaccgtctcctcagcgtcgaccaagggcccctccgtgtttcctctggccccttccagcaagtccacctctggcggaacagccgctctgggctgcctggtcaaggactacttccccgagcctgtgaccgtgtcctggaactctggcgccctgacatctggcgtgcacaccttccctgctgtgctgcagtctagcggcctgtactccctgtcctccgtcgtgacagtgccctccagctctctgggcacccagacctacatctgcaacgtgaaccacaagccctccaacaccaaggtggacaagcgggtggaacccaagtcctgcgacaagacccatacctgccctccctgccctgctcctgaagctgaaggcgcccctagcgtgttcctgttccctccaaagcccaaggacaccctgatgatctcccggacccctgaagtgacctgcgtggtggtggatgtgtcccacgaggacccagaagtgaagttcaattggtacgtggacggcgtggaagtgcacaacgccaagaccaagcctagagaggaacagtacaactccacctaccgggtggtgtccgtgctgaccgtgctgcaccaggattggctgaacggcaaagagtacaagtgcaaggtgtccaacaaggccctgcctagctccatcgaaaagaccatctccaaggctaagggccagccccgcgagccccaggtgtacacactgcctccatcccgggaagagatgaccaagaaccaggtgtccctgacttgcctcgtgaagggcttctacccctccgatatcgccgtggaatgggagtccaacggccagcctgagaacaactacaagaccacccctcccgtgctggactccgacggctcattcttcctgtacagcaagctgacagtggataagtcccggtggcagcaggggaacgtgttctcctgctccgtgatgcacgaggctctgcacaaccactacacacagaagtccctgtctctgtcccctggc

SEQ ID NO: 212 - DNA, 1337 bp, Artificial Sequence
  Synthetic: mAb-CD73.3-Vh-hHC-IgG2-C219S
gaagtgcagctggtggagtctgggggaggcttggtacagcctggcaggtccctgagactctcctgtgcagcctctggattcacctttgatgattatgccatgcactgggtccggcaagctccagggaagggcctggagtgggtctcaggtattagttggaagagtggtagcataggctatgcggactctgtgaagggccgattcaccatctccagagacaacgccaagaactccctgtatctgcaaatgaacagtctgagagctgaggacacggccttgtattactgtgccaaagggtattacgttattttgactggccttgactactggggccagggaaccctggtcaccgtctcctcagcgtcgaccaagggcccctctgtgtttcctctggccccttgctcccggtccacctctgagtctaccgctgctctgggctgcctggtcaaggactacttccccgagcctgtgaccgtgtcctggaactctggcgctctgacctccggcgtgcacacctttccagccgtgctgcagtcctccggcctgtactctctgtcctccgtcgtgaccgtgccctcctccaacttcggcacccagacctacacctgtaacgtggaccacaagccctccaacaccaaggtggacaagaccgtggaacggaagtcctgcgtggaatgccctccttgccctgcacctcctgtggctggcccttccgtgttcctgttccccccaaagcccaaggacaccctgatgatctcccggacccccgaagtgacctgcgtggtggtggatgtgtcccacgaggaccccgaggtgcagttcaattggtacgtggacggcgtggaagtgcacaacgccaagaccaagcccagagaggaacagttcaactccaccttccgggtggtgtccgtgctgaccgtggtgcaccaggactggctgaacggcaaagagtacaagtgcaaggtgtccaacaagggcctgcctgcccccatcgaaaagaccatctccaagacaaagggccagccccgcgagcctcaggtgtacacactgcctcccagccgggaagagatgaccaagaaccaggtgtccctgacctgtctggtcaagggcttctacccctccgatatcgccgtggaatgggagtccaacggccagcccgagaacaactacaagaccaccccccccatgctggactccgacggctcattcttcctgtactccaagctgacagtggacaagtcccggtggcagcagggcaacgtgttctcctgctctgtgatgcacgaggccctgcacaaccactacacccagaagtccctgtccctgagccccggcaa

SEQ ID NO: 213 - DNA, 1338 bp, Artificial Sequence
  Synthetic: mAb-CD73.3-Vh-hHC-IgG2-C219S-IgG1.1f
gaagtgcagctggtggagtctgggggaggcttggtacagcctggcaggtccctgagactctcctgtgcagcctctggattcacctttgatgattatgccatgcactgggtccggcaagctccagggaagggcctggagtgggtctcaggtattagttggaagagtggtagcataggctatgcggactctgtgaagggccgattcaccatctccagagacaacgccaagaactccctgtatctgcaaatgaacagtctgagagctgaggacacggccttgtattactgtgccaaagggtattacgttattttgactggccttgactactggggccagggaaccctggtcaccgtctcctcagcgtcgaccaagggcccatcggtcttccccctggcgccctgctccaggagcacctccgagagcacagcggccctgggctgcctggtcaaggactacttccccgaaccggtgacggtgtcgtggaactcaggcgctctgaccagcggcgtgcacaccttcccagctgtcctacagtcctcaggactctactccctcagcagcgtggtgaccgtgccctccagcaacttcggcacccagacctacacctgcaacgtagatcacaagcccagcaacaccaaggtggacaagacagttgagcgcaaatcctgtgtcgagtgcccaccgtgcccagcaccacctgtggcaggaccgtcagtcttcctcttccccccaaaacccaaggacaccctcatgatctcccggacccctgaggtcacatgcgtggtggtggacgtgagccacgaagaccctgaggtcaagttcaactggtacgtggacggcgtggaggtgcataatgccaagacaaagccgcgggaggagcagtacaacagcacgtaccgtgtggtcagcgtcctcaccgtcctgcaccaggactggctgaatggcaaggagtacaagtgcaaggtctccaacaaagccctcccaagcagcatcgagaaaaccatctccaaagccaaagggcagccccgagaaccacaggtgtacaccctgcccccatcccgggaggagatgaccaagaaccaggtcagcctgacctgcctggtcaaaggcttctatcccagcgacatcgccgtggagtgggagagcaatgggcagccggagaacaactacaagaccacgcctcccgtgctggactccgacggctccttcttcctctatagcaagctcaccgtggacaagagcaggtggcagcaggggaacgtcttctcatgctccgtgatgcatgaggctctgcacaaccactacacgcagaagagcctctccctgtccccgggtaaa

SEQ ID NO: 214 - DNA, 1350 bp, Artificial Sequence
  Synthetic: mAb-CD73.4-Vh-hHC-IgG1.1f
caggtgcagctggtggagtctgggggaggcgtggtccagcctgggaggtccctgagactctcctgtgcagcctctggattcaccttcagtaactatggcatgcactgggtccgccaggctccaggcaaggggctggagtgggtggcagttatattgtatgatggaagtaataaatactatccagactccgtgaagggccgattcaccatctccagagacaattccaagaacacgctgtatctgcaaatgaacagcctgagagccgaggacacggctgtgtattactgtgcgagagggggcagcagctggtaccctgattcttttgatatctggggccaaggaacaatggtcaccgtctcttcagcgtcgaccaagggcccctccgtgtttcctctggccccttccagcaagtccacctctggcggaacagccgctctgggctgcctggtcaaggactacttccccgagcctgtgaccgtgtcctggaactctggcgccctgacatctggcgtgcacaccttccctgctgtgctgcagtctagcggcctgtactccctgtcctccgtcgtgacagtgccctccagctctctgggcacccagacctacatctgcaacgtgaaccacaagccctccaacaccaaggtggacaagcgggtggaacccaagtcctgcgacaagacccatacctgccctccctgccctgctcctgaagctgaaggcgcccctagcgtgttcctgttccctccaaagcccaaggacaccctgatgatctcccggacccctgaagtgacctgcgtggtggtggatgtgtcccacgaggacccagaagtgaagttcaattggtacgtggacggcgtggaagtgcacaacgccaagaccaagcctagagaggaacagtacaactccacctaccgggtggtgtccgtgctgaccgtgctgcaccaggattggctgaacggcaaagagtacaagtgcaaggtgtccaacaaggccctgcctagctccatcgaaaagaccatctccaaggctaagggccagccccgcgagccccaggtgtacacactgcctccatcccgggaagagatgaccaagaaccaggtgtccctgacttgcctcgtgaagggcttctacccctccgatatcgccgtggaatgggagtccaacggccagcctgagaacaactacaagaccacccctcccgtgctggactccgacggctcattcttcctgtacagcaagctgacagtggataagtcccggtggcagcaggggaacgtgttctcctgctccgtgatgcacgaggctctgcacaaccactacacacagaagtccctgtctctgtcccctggc

SEQ ID NO: 215 - DNA, 1341 bp, Artificial Sequence
  Synthetic: mAb-CD73.4-Vh-hHC-IgG2-C219S
caggtgcagctggtggagtctgggggaggcgtggtccagcctgggaggtccctgagactctcctgtgcagcctctggattcaccttcagtaactatggcatgcactgggtccgccaggctccaggcaaggggctggagtgggtggcagttatattgtatgatggaagtaataaatactatccagactccgtgaagggccgattcaccatctccagagacaattccaagaacacgctgtatctgcaaatgaacagcctgagagccgaggacacggctgtgtattactgtgcgagagggggcagcagctggtaccctgattcttttgatatctggggccaaggaacaatggtcaccgtctcttcagcgtcgaccaagggcccctctgtgtttcctctggccccttgctcccggtccacctctgagtctaccgctgctctgggctgcctggtcaaggactacttccccgagcctgtgaccgtgtcctggaactctggcgctctgacctccggcgtgcacacctttccagccgtgctgcagtcctccggcctgtactctctgtcctccgtcgtgaccgtgccctcctccaacttcggcacccagacctacacctgtaacgtggaccacaagccctccaacaccaaggtggacaagaccgtggaacggaagtcctgcgtggaatgccctccttgccctgcacctcctgtggctggcccttccgtgttcctgttccccccaaagcccaaggacaccctgatgatctcccggacccccgaagtgacctgcgtggtggtggatgtgtcccacgaggaccccgaggtgcagttcaattggtacgtggacggcgtggaagtgcacaacgccaagaccaagcccagagaggaacagttcaactccaccttccgggtggtgtccgtgctgaccgtggtgcaccaggactggctgaacggcaaagagtacaagtgcaaggtgtccaacaagggcctgcctgcccccatcgaaaagaccatctccaagacaaagggccagccccgcgagcctcaggtgtacacactgcctcccagccgggaagagatgaccaagaaccaggtgtccctgacctgtctggtcaagggcttctacccctccgatatcgccgtggaatgggagtccaacggccagcccgagaacaactacaagaccaccccccccatgctggactccgacggctcattcttcctgtactccaagctgacagtggacaagtcccggtggcagcagggcaacgtgttctcctgctctgtgatgcacgaggccctgcacaaccactacacccagaagtccctgtccctgagccccggcaaa

SEQ ID NO: 216 - DNA, 1341 bp, Artificial Sequence; identical to SEQ ID NO: 134
  Synthetic: mAb-CD73.4-Vh-hHC-IgG2-C219S-IgG1.1f

SEQ ID NO: 217 - DNA, 1350 bp, Artificial Sequence
  Synthetic: mAb-CD73.5-Vh-hHC-IgG1.1f
caggtgcagctggtggagtctgggggaggcgtggtccagcctgggaggtccctgagactctcctgtgcaagctctggattcaccttcagtaactatggcatgcactgggtccgccaggctccaggcaaggggctggagtgggtggcagttatattgtatgatggaagtaataaatactatccagactccgtgaagggccgattcaccatctccagagacaattccaagaacacgctgtatctgcaaatgaacagcctgagagccgaggacacggctgtgtattactgtgcgagagggggcagcagctggtaccctgattcttttgatatctggggccaaggaacaatggtcaccgtctcttcagcgtcgaccaagggcccctccgtgtttcctctggccccttccagcaagtccacctctggcggaacagccgctctgggctgcctggtcaaggactacttccccgagcctgtgaccgtgtcctggaactctggcgccctgacatctggcgtgcacaccttccctgctgtgctgcagtctagcggcctgtactccctgtcctccgtcgtgacagtgccctccagctctctgggcacccagacctacatctgcaacgtgaaccacaagccctccaacaccaaggtggacaagcgggtggaacccaagtcctgcgacaagacccatacctgccctccctgccctgctcctgaagctgaaggcgcccctagcgtgttcctgttccctccaaagcccaaggacaccctgatgatctcccggacccctgaagtgacctgcgtggtggtggatgtgtcccacgaggacccagaagtgaagttcaattggtacgtggacggcgtggaagtgcacaacgccaagaccaagcctagagaggaacagtacaactccacctaccgggtggtgtccgtgctgaccgtgctgcaccaggattggctgaacggcaaagagtacaagtgcaaggtgtccaacaaggccctgcctagctccatcgaaaagaccatctccaaggctaagggccagccccgcgagccccaggtgtacacactgcctccatcccgggaagagatgaccaagaaccaggtgtccctgacttgcctcgtgaagggcttctacccctccgatatcgccgtggaatgggagtccaacggccagcctgagaacaactacaagaccacccctcccgtgctggactccgacggctcattcttcctgtacagcaagctgacagtggataagtcccggtggcagcaggggaacgtgttctcctgctccgtgatgcacgaggctctgcacaaccactacacacagaagtccctgtctctgtcccctggc

SEQ ID NO: 218 - DNA, 1341 bp, Artificial Sequence
  Synthetic: mAb-CD73.5-Vh-hHC-IgG2-C219S
caggtgcagctggtggagtctgggggaggcgtggtccagcctgggaggtccctgagactctcctgtgcaagctctggattcaccttcagtaactatggcatgcactgggtccgccaggctccaggcaaggggctggagtgggtggcagttatattgtatgatggaagtaataaatactatccagactccgtgaagggccgattcaccatctccagagacaattccaagaacacgctgtatctgcaaatgaacagcctgagagccgaggacacggctgtgtattactgtgcgagagggggcagcagctggtaccctgattcttttgatatctggggccaaggaacaatggtcaccgtctcttcagcgtcgaccaagggcccctctgtgtttcctctggccccttgctcccggtccacctctgagtctaccgctgctctgggctgcctggtcaaggactacttccccgagcctgtgaccgtgtcctggaactctggcgctctgacctccggcgtgcacacctttccagccgtgctgcagtcctccggcctgtactctctgtcctccgtcgtgaccgtgccctcctccaacttcggcacccagacctacacctgtaacgtggaccacaagccctccaacaccaaggtggacaagaccgtggaacggaagtcctgcgtggaatgccctccttgccctgcacctcctgtggctggcccttccgtgttcctgttccccccaaagcccaaggacaccctgatgatctcccggacccccgaagtgacctgcgtggtggtggatgtgtcccacgaggaccccgaggtgcagttcaattggtacgtggacggcgtggaagtgcacaacgccaagaccaagcccagagaggaacagttcaactccaccttccgggtggtgtccgtgctgaccgtggtgcaccaggactggctgaacggcaaagagtacaagtgcaaggtgtccaacaagggcctgcctgcccccatcgaaaagaccatctccaagacaaagggccagccccgcgagcctcaggtgtacacactgcctcccagccgggaagagatgaccaagaaccaggtgtccctgacctgtctggtcaagggcttctacccctccgatatcgccgtggaatgggagtccaacggccagcccgagaacaactacaagaccaccccccccatgctggactccgacggctcattcttcctgtactccaagctgacagtggacaagtcccggtggcagcagggcaacgtgttctcctgctctgtgatgcacgaggccctgcacaaccactacacccagaagtccctgtccctgagccccggcaaa

SEQ ID NO: 219 - DNA, 1341 bp, Artificial Sequence
  Synthetic: mAb-CD73.5-Vh-hHC-IgG2-C219S-IgG1.1f
caggtgcagctggtggagtctgggggaggcgtggtccagcctgggaggtccctgagactctcctgtgcaagctctggattcaccttcagtaactatggcatgcactgggtccgccaggctccaggcaaggggctggagtgggtggcagttatattgtatgatggaagtaataaatactatccagactccgtgaagggccgattcaccatctccagagacaattccaagaacacgctgtatctgcaaatgaacagcctgagagccgaggacacggctgtgtattactgtgcgagagggggcagcagctggtaccctgattcttttgatatctggggccaaggaacaatggtcaccgtctcttcagcgtcgaccaagggcccatcggtcttccccctggcgccctgctccaggagcacctccgagagcacagcggccctgggctgcctggtcaaggactacttccccgaaccggtgacggtgtcgtggaactcaggcgctctgaccagcggcgtgcacaccttcccagctgtcctacagtcctcaggactctactccctcagcagcgtggtgaccgtgccctccagcaacttcggcacccagacctacacctgcaacgtagatcacaagcccagcaacaccaaggtggacaagacagttgagcgcaaatcctgtgtcgagtgcccaccgtgcccagcaccacctgtggcaggaccgtcagtcttcctcttccccccaaaacccaaggacaccctcatgatctcccggacccctgaggtcacatgcgtggtggtggacgtgagccacgaagaccctgaggtcaagttcaactggtacgtggacggcgtggaggtgcataatgccaagacaaagccgcgggaggagcagtacaacagcacgtaccgtgtggtcagcgtcctcaccgtcctgcaccaggactggctgaatggcaaggagtacaagtgcaaggtctccaacaaagccctcccaagcagcatcgagaaaaccatctccaaagccaaagggcagccccgagaaccacaggtgtacaccctgcccccatcccgggaggagatgaccaagaaccaggtcagcctgacctgcctggtcaaaggcttctatcccagcgacatcgccgtggagtgggagagcaatgggcagccggagaacaactacaagaccacgcctcccgtgctggactccgacggctccttcttcctctatagcaagctcaccgtggacaagagcaggtggcagcaggggaacgtcttctcatgctccgtgatgcatgaggctctgcacaaccactacacgcagaagagcctctccctgtccccgggtaaa

SEQ ID NO: 220 - DNA, 1254 bp, Artificial Sequence
  Synthetic: mAb-CD73.6-Vh-hHC-IgG1.1f
ggcatgcactgggtccgccaggctccaggcaaggggctggagtgggtggcagttatattgtatgattccagtaataaatactatccagactccgtgaagggccgattcaccatctccagagacaattccaagaacacgctgtatctgcaaatgaacagcctgagagccgaggacacggctgtgtattactgtgcgagagggggcagcagctggtaccctgattcttttgatatctggggccaaggaacaatggtcaccgtctcttcagcgtcgaccaagggcccctccgtgtttcctctggccccttccagcaagtccacctctggcggaacagccgctctgggctgcctggtcaaggactacttccccgagcctgtgaccgtgtcctggaactctggcgccctgacatctggcgtgcacaccttccctgctgtgctgcagtctagcggcctgtactccctgtcctccgtcgtgacagtgccctccagctctctgggcacccagacctacatctgcaacgtgaaccacaagccctccaacaccaaggtggacaagcgggtggaacccaagtcctgcgacaagacccatacctgccctccctgccctgctcctgaagctgaaggcgcccctagcgtgttcctgttccctccaaagcccaaggacaccctgatgatctcccggacccctgaagtgacctgcgtggtggtggatgtgtcccacgaggacccagaagtgaagttcaattggtacgtggacggcgtggaagtgcacaacgccaagaccaagcctagagaggaacagtacaactccacctaccgggtggtgtccgtgctgaccgtgctgcaccaggattggctgaacggcaaagagtacaagtgcaaggtgtccaacaaggccctgcctagctccatcgaaaagaccatctccaaggctaagggccagccccgcgagccccaggtgtacacactgcctccatcccgggaagagatgaccaagaaccaggtgtccctgacttgcctcgtgaagggcttctacccctccgatatcgccgtggaatgggagtccaacggccagcctgagaacaactacaagaccacccctcccgtgctggactccgacggctcattcttcctgtacagcaagctgacagtggataagtcccggtggcagcaggggaacgtgttctcctgctccgtgatgcacgaggctctgcacaaccactacacacagaagtccctgtctctgtcccctggc

SEQ ID NO: 221 - DNA, 1341 bp, Artificial Sequence
  Synthetic: mAb-CD73.6-Vh-hHC-IgG2-C219S
caggtgcagctggtggagtctgggggaggcgtggtccagcctgggaggtccctgagactctcctgtgcagcctctggattcaccttcagtaactatggcatgcactgggtccgccaggctccaggcaaggggctggagtgggtggcagttatattgtatgattccagtaataaatactatccagactccgtgaagggccgattcaccatctccagagacaattccaagaacacgctgtatctgcaaatgaacagcctgagagccgaggacacggctgtgtattactgtgcgagagggggcagcagctggtaccctgattcttttgatatctggggccaaggaacaatggtcaccgtctcttcagcgtcgaccaagggcccctctgtgtttcctctggccccttgctcccggtccacctctgagtctaccgctgctctgggctgcctggtcaaggactacttccccgagcctgtgaccgtgtcctggaactctggcgctctgacctccggcgtgcacacctttccagccgtgctgcagtcctccggcctgtactctctgtcctccgtcgtgaccgtgccctcctccaacttcggcacccagacctacacctgtaacgtggaccacaagccctccaacaccaaggtggacaagaccgtggaacggaagtcctgcgtggaatgccctccttgccctgcacctcctgtggctggcccttccgtgttcctgttccccccaaagcccaaggacaccctgatgatctcccggacccccgaagtgacctgcgtggtggtggatgtgtcccacgaggaccccgaggtgcagttcaattggtacgtggacggcgtggaagtgcacaacgccaagaccaagcccagagaggaacagttcaactccaccttccgggtggtgtccgtgctgaccgtggtgcaccaggactggctgaacggcaaagagtacaagtgcaaggtgtccaacaagggcctgcctgcccccatcgaaaagaccatctccaagacaaagggccagccccgcgagcctcaggtgtacacactgcctcccagccgggaagagatgaccaagaaccaggtgtccctgacctgtctggtcaagggcttctacccctccgatatcgccgtggaatgggagtccaacggccagcccgagaacaactacaagaccaccccccccatgctggactccgacggctcattcttcctgtactccaagctgacagtggacaagtcccggtggcagcagggcaacgtgttctcctgctctgtgatgcacgaggccctgcacaaccactacacccagaagtccctgtccctgagccccggcaaa

SEQ ID NO: 222 - DNA, 1341 bp, Artificial Sequence
  Synthetic: mAb-CD73.6-Vh-hHC-IgG2-C219S-IgG1.1f
caggtgcagctggtggagtctgggggaggcgtggtccagcctgggaggtccctgagactctcctgtgcagcctctggattcaccttcagtaactatggcatgcactgggtccgccaggctccaggcaaggggctggagtgggtggcagttatattgtatgattccagtaataaatactatccagactccgtgaagggccgattcaccatctccagagacaattccaagaacacgctgtatctgcaaatgaacagcctgagagccgaggacacggctgtgtattactgtgcgagagggggcagcagctggtaccctgattcttttgatatctggggccaaggaacaatggtcaccgtctcttcagcgtcgaccaagggcccatcggtcttccccctggcgccctgctccaggagcacctccgagagcacagcggccctgggctgcctggtcaaggactacttccccgaaccggtgacggtgtcgtggaactcaggcgctctgaccagcggcgtgcacaccttcccagctgtcctacagtcctcaggactctactccctcagcagcgtggtgaccgtgccctccagcaacttcggcacccagacctacacctgcaacgtagatcacaagcccagcaacaccaaggtggacaagacagttgagcgcaaatcctgtgtcgagtgcccaccgtgcccagcaccacctgtggcaggaccgtcagtcttcctcttccccccaaaacccaaggacaccctcatgatctcccggacccctgaggtcacatgcgtggtggtggacgtgagccacgaagaccctgaggtcaagttcaactggtacgtggacggcgtggaggtgcataatgccaagacaaagccgcgggaggagcagtacaacagcacgtaccgtgtggtcagcgtcctcaccgtcctgcaccaggactggctgaatggcaaggagtacaagtgcaaggtctccaacaaagccctcccaagcagcatcgagaaaaccatctccaaagccaaagggcagccccgagaaccacaggtgtacaccctgcccccatcccgggaggagatgaccaagaaccaggtcagcctgacctgcctggtcaaaggcttctatcccagcgacatcgccgtggagtgggagagcaatgggcagccggagaacaactacaagaccacgcctcccgtgctggactccgacggctccttcttcctctatagcaagctcaccgtggacaagagcaggtggcagcaggggaacgtcttctcatgctccgtgatgcatgaggctctgcacaaccactacacgcagaagagcctctccctgtccccgggtaaa

SEQ ID NO: 223 - DNA, 1350 bp, Artificial Sequence
  Synthetic: mAb-CD73.7-Vh-hHC-IgG1.1f
caggtgcagctggtggagtctgggggaggcgtggtccagcctgggaggtccctgagactctcctgtgcaagctctggattcaccttcagtaactatggcatgcactgggtccgccaggctccaggcaaggggctggagtgggtggcagttatattgtatgattccagtaataaatactatccagactccgtgaagggccgattcaccatctccagagacaattccaagaacacgctgtatctgcaaatgaacagcctgagagccgaggacacggctgtgtattactgtgcgagagggggcagcagctggtaccctgattcttttgatatctggggccaaggaacaatggtcaccgtctcttcagcgtcgaccaagggcccctccgtgtttcctctggccccttccagcaagtccacctctggcggaacagccgctctgggctgcctggtcaaggactacttccccgagcctgtgaccgtgtcctggaactctggcgccctgacatctggcgtgcacaccttccctgctgtgctgcagtctagcggcctgtactccctgtcctccgtcgtgacagtgccctccagctctctgggcacccagacctacatctgcaacgtgaaccacaagccctccaacaccaaggtggacaagcgggtggaacccaagtcctgcgacaagacccatacctgccctccctgccctgctcctgaagctgaaggcgcccctagcgtgttcctgttccctccaaagcccaaggacaccctgatgatctcccggacccctgaagtgacctgcgtggtggtggatgtgtcccacgaggacccagaagtgaagttcaattggtacgtggacggcgtggaagtgcacaacgccaagaccaagcctagagaggaacagtacaactccacctaccgggtggtgtccgtgctgaccgtgctgcaccaggattggctgaacggcaaagagtacaagtgcaaggtgtccaacaaggccctgcctagctccatcgaaaagaccatctccaaggctaagggccagccccgcgagccccaggtgtacacactgcctccatcccgggaagagatgaccaagaaccaggtgtccctgacttgcctcgtgaagggcttctacccctccgatatcgccgtggaatgggagtccaacggccagcctgagaacaactacaagaccacccctcccgtgctggactccgacggctcattcttcctgtacagcaagctgacagtggataagtcccggtggcagcaggggaacgtgttctcctgctccgtgatgcacgaggctctgcacaaccactacacacagaagtccctgtctctgtcccctggc

SEQ ID NO: 224 - DNA, 1341 bp, Artificial Sequence
  Synthetic: mAb-CD73.7-Vh-hHC-IgG2-C219S
caggtgcagctggtggagtctgggggaggcgtggtccagcctgggaggtccctgagactctcctgtgcaagctctggattcaccttcagtaactatggcatgcactgggtccgccaggctccaggcaaggggctggagtgggtggcagttatattgtatgattccagtaataaatactatccagactccgtgaagggccgattcaccatctccagagacaattccaagaacacgctgtatctgcaaatgaacagcctgagagccgaggacacggctgtgtattactgtgcgagagggggcagcagctggtaccctgattcttttgatatctggggccaaggaacaatggtcaccgtctcttcagcgtcgaccaagggcccctctgtgtttcctctggccccttgctcccggtccacctctgagtctaccgctgctctgggctgcctggtcaaggactacttccccgagcctgtgaccgtgtcctggaactctggcgctctgacctccggcgtgcacacctttccagccgtgctgcagtcctccggcctgtactctctgtcctccgtcgtgaccgtgccctcctccaacttcggcacccagacctacacctgtaacgtggaccacaagccctccaacaccaaggtggacaagaccgtggaacggaagtcctgcgtggaatgccctccttgccctgcacctcctgtggctggcccttccgtgttcctgttccccccaaagcccaaggacaccctgatgatctcccggacccccgaagtgacctgcgtggtggtggatgtgtcccacgaggaccccgaggtgcagttcaattggtacgtggacggcgtggaagtgcacaacgccaagaccaagcccagagaggaacagttcaactccaccttccgggtggtgtccgtgctgaccgtggtgcaccaggactggctgaacggcaaagagtacaagtgcaaggtgtccaacaagggcctgcctgcccccatcgaaaagaccatctccaagacaaagggccagccccgcgagcctcaggtgtacacactgcctcccagccgggaagagatgaccaagaaccaggtgtccctgacctgtctggtcaagggcttctacccctccgatatcgccgtggaatgggagtccaacggccagcccgagaacaactacaagaccaccccccccatgctggactccgacggctcattcttcctgtactccaagctgacagtggacaagtcccggtggcagcagggcaacgtgttctcctgctctgtgatgcacgaggccctgcacaaccactacacccagaagtccctgtccctgagccccggcaaa

SEQ ID NO: 225 - DNA, 1341 bp, Artificial Sequence
  Synthetic: mAb-CD73.7-Vh-hHC-IgG2-C219S-IgG1.1f
caggtgcagctggtggagtctgggggaggcgtggtccagcctgggaggtccctgagactctcctgtgcaagctctggattcaccttcagtaactatggcatgcactgggtccgccaggctccaggcaaggggctggagtgggtggcagttatattgtatgattccagtaataaatactatccagactccgtgaagggccgattcaccatctccagagacaattccaagaacacgctgtatctgcaaatgaacagcctgagagccgaggacacggctgtgtattactgtgcgagagggggcagcagctggtaccctgattcttttgatatctggggccaaggaacaatggtcaccgtctcttcagcgtcgaccaagggcccatcggtcttccccctggcgccctgctccaggagcacctccgagagcacagcggccctgggctgcctggtcaaggactacttccccgaaccggtgacggtgtcgtggaactcaggcgctctgaccagcggcgtgcacaccttcccagctgtcctacagtcctcaggactctactccctcagcagcgtggtgaccgtgccctccagcaacttcggcacccagacctacacctgcaacgtagatcacaagcccagcaacaccaaggtggacaagacagttgagcgcaaatcctgtgtcgagtgcccaccgtgcccagcaccacctgtggcaggaccgtcagtcttcctcttccccccaaaacccaaggacaccctcatgatctcccggacccctgaggtcacatgcgtggtggtggacgtgagccacgaagaccctgaggtcaagttcaactggtacgtggacggcgtggaggtgcataatgccaagacaaagccgcgggaggagcagtacaacagcacgtaccgtgtggtcagcgtcctcaccgtcctgcaccaggactggctgaatggcaaggagtacaagtgcaaggtctccaacaaagccctcccaagcagcatcgagaaaaccatctccaaagccaaagggcagccccgagaaccacaggtgtacaccctgcccccatcccgggaggagatgaccaagaaccaggtcagcctgacctgcctggtcaaaggcttctatcccagcgacatcgccgtggagtgggagagcaatgggcagccggagaacaactacaagaccacgcctcccgtgctggactccgacggctccttcttcctctatagcaagctcaccgtggacaagagcaggtggcagcaggggaacgtcttctcatgctccgtgatgcatgaggctctgcacaaccactacacgcagaagagcctctccctgtccccgggtaaa

SEQ ID NO: 226 - DNA, 1350 bp, Artificial Sequence
  Synthetic: mAb-CD73.8-Vh-hHC-IgG1.1f
caggtgcagctggtggagtctgggggaggcgtggtccagcctgggaggtccctgagactctcctgtgcagcctctggattcaccttcagtaactatggcatgcactgggtccgccaggctccaggcaaggggctggagtgggtggcagttatatggtatgattccagtaataaatactatccagactccgtgaagggccgattcaccatctccagagacaattccaagaacacgctgtatctgcaaatgaacagcctgagagccgaggacacggctgtgtattactgtgcgagagggggcagcagctggtaccctgattcttttgatatctggggccaaggaacaatggtcaccgtctcttcagcgtcgaccaagggcccctccgtgtttcctctggccccttccagcaagtccacctctggcggaacagccgctctgggctgcctggtcaaggactacttccccgagcctgtgaccgtgtcctggaactctggcgccctgacatctggcgtgcacaccttccctgctgtgctgcagtctagcggcctgtactccctgtcctccgtcgtgacagtgccctccagctctctgggcacccagacctacatctgcaacgtgaaccacaagccctccaacaccaaggtggacaagcgggtggaacccaagtcctgcgacaagacccatacctgccctccctgccctgctcctgaagctgaaggcgcccctagcgtgttcctgttccctccaaagcccaaggacaccctgatgatctcccggacccctgaagtgacctgcgtggtggtggatgtgtcccacgaggacccagaagtgaagttcaattggtacgtggacggcgtggaagtgcacaacgccaagaccaagcctagagaggaacagtacaactccacctaccgggtggtgtccgtgctgaccgtgctgcaccaggattggctgaacggcaaagagtacaagtgcaaggtgtccaacaaggccctgcctagctccatcgaaaagaccatctccaaggctaagggccagccccgcgagccccaggtgtacacactgcctccatcccgggaagagatgaccaagaaccaggtgtccctgacttgcctcgtgaagggcttctacccctccgatatcgccgtggaatgggagtccaacggccagcctgagaacaactacaagaccacccctcccgtgctggactccgacggctcattcttcctgtacagcaagctgacagtggataagtcccggtggcagcaggggaacgtgttctcctgctccgtgatgcacgaggctctgcacaaccactacacacagaagtccctgtctctgtcccctggc

SEQ ID NO: 227 - DNA, 1341 bp, Artificial Sequence
  Synthetic: mAb-CD73.8-Vh-hHC-IgG2-C219S
caggtgcagctggtggagtctgggggaggcgtggtccagcctgggaggtccctgagactctcctgtgcagcctctggattcaccttcagtaactatggcatgcactgggtccgccaggctccaggcaaggggctggagtgggtggcagttatatggtatgattccagtaataaatactatccagactccgtgaagggccgattcaccatctccagagacaattccaagaacacgctgtatctgcaaatgaacagcctgagagccgaggacacggctgtgtattactgtgcgagagggggcagcagctggtaccctgattcttttgatatctggggccaaggaacaatggtcaccgtctcttcagcgtcgaccaagggcccctctgtgtttcctctggccccttgctcccggtccacctctgagtctaccgctgctctgggctgcctggtcaaggactacttccccgagcctgtgaccgtgtcctggaactctggcgctctgacctccggcgtgcacacctttccagccgtgctgcagtcctccggcctgtactctctgtcctccgtcgtgaccgtgccctcctccaacttcggcacccagacctacacctgtaacgtggaccacaagccctccaacaccaaggtggacaagaccgtggaacggaagtcctgcgtggaatgccctccttgccctgcacctcctgtggctggcccttccgtgttcctgttccccccaaagcccaaggacaccctgatgatctcccggacccccgaagtgacctgcgtggtggtggatgtgtcccacgaggaccccgaggtgcagttcaattggtacgtggacggcgtggaagtgcacaacgccaagaccaagcccagagaggaacagttcaactccaccttccgggtggtgtccgtgctgaccgtggtgcaccaggactggctgaacggcaaagagtacaagtgcaaggtgtccaacaagggcctgcctgcccccatcgaaaagaccatctccaagacaaagggccagccccgcgagcctcaggtgtacacactgcctcccagccgggaagagatgaccaagaaccaggtgtccctgacctgtctggtcaagggcttctacccctccgatatcgccgtggaatgggagtccaacggccagcccgagaacaactacaagaccaccccccccatgctggactccgacggctcattcttcctgtactccaagctgacagtggacaagtcccggtggcagcagggcaacgtgttctcctgctctgtgatgcacgaggccctgcacaaccactacacccagaagtccctgtccctgagccccggcaaa

SEQ ID NO: 228 - DNA, 1341 bp, Artificial Sequence
  Synthetic: mAb-CD73.8-Vh-hHC-IgG2-C219S-IgG1.1f
caggtgcagctggtggagtctgggggaggcgtggtccagcctgggaggtccctgagactctcctgtgcagcctctggattcaccttcagtaactatggcatgcactgggtccgccaggctccaggcaaggggctggagtgggtggcagttatatggtatgattccagtaataaatactatccagactccgtgaagggccgattcaccatctccagagacaattccaagaacacgctgtatctgcaaatgaacagcctgagagccgaggacacggctgtgtattactgtgcgagagggggcagcagctggtaccctgattcttttgatatctggggccaaggaacaatggtcaccgtctcttcagcgtcgaccaagggcccatcggtcttccccctggcgccctgctccaggagcacctccgagagcacagcggccctgggctgcctggtcaaggactacttccccgaaccggtgacggtgtcgtggaactcaggcgctctgaccagcggcgtgcacaccttcccagctgtcctacagtcctcaggactctactccctcagcagcgtggtgaccgtgccctccagcaacttcggcacccagacctacacctgcaacgtagatcacaagcccagcaacaccaaggtggacaagacagttgagcgcaaatcctgtgtcgagtgcccaccgtgcccagcaccacctgtggcaggaccgtcagtcttcctcttccccccaaaacccaaggacaccctcatgatctcccggacccctgaggtcacatgcgtggtggtggacgtgagccacgaagaccctgaggtcaagttcaactggtacgtggacggcgtggaggtgcataatgccaagacaaagccgcgggaggagcagtacaacagcacgtaccgtgtggtcagcgtcctcaccgtcctgcaccaggactggctgaatggcaaggagtacaagtgcaaggtctccaacaaagccctcccaagcagcatcgagaaaaccatctccaaagccaaagggcagccccgagaaccacaggtgtacaccctgcccccatcccgggaggagatgaccaagaaccaggtcagcctgacctgcctggtcaaaggcttctatcccagcgacatcgccgtggagtgggagagcaatgggcagccggagaacaactacaagaccacgcctcccgtgctggactccgacggctccttcttcctctatagcaagctcaccgtggacaagagcaggtggcagcaggggaacgtcttctcatgctccgtgatgcatgaggctctgcacaaccactacacgcagaagagcctctccctgtccccgggtaaa

SEQ ID NO: 229 - DNA, 1350 bp, Artificial Sequence
  Synthetic: mAb-CD73.9-Vh-hHC-IgG1.1f
caggtgcagctggtggagtctgggggaggcgtggtccagcctgggaggtccctgagactctcctgtgcaagctctggattcaccttcagtaactatggcatgcactgggtccgccaggctccaggcaaggggctggagtgggtggcagttatatggtatgattccagtaataaatactatccagactccgtgaagggccgattcaccatctccagagacaattccaagaacacgctgtatctgcaaatgaacagcctgagagccgaggacacggctgtgtattactgtgcgagagggggcagcagctggtaccctgattcttttgatatctggggccaaggaacaatggtcaccgtctcttcagcgtcgaccaagggcccctccgtgtttcctctggccccttccagcaagtccacctctggcggaacagccgctctgggctgcctggtcaaggactacttccccgagcctgtgaccgtgtcctggaactctggcgccctgacatctggcgtgcacaccttccctgctgtgctgcagtctagcggcctgtactccctgtcctccgtcgtgacagtgccctccagctctctgggcacccagacctacatctgcaacgtgaaccacaagccctccaacaccaaggtggacaagcgggtggaacccaagtcctgcgacaagacccatacctgccctccctgccctgctcctgaagctgaaggcgcccctagcgtgttcctgttccctccaaagcccaaggacaccctgatgatctcccggacccctgaagtgacctgcgtggtggtggatgtgtcccacgaggacccagaagtgaagttcaattggtacgtggacggcgtggaagtgcacaacgccaagaccaagcctagagaggaacagtacaactccacctaccgggtggtgtccgtgctgaccgtgctgcaccaggattggctgaacggcaaagagtacaagtgcaaggtgtccaacaaggccctgcctagctccatcgaaaagaccatctccaaggctaagggccagccccgcgagccccaggtgtacacactgcctccatcccgggaagagatgaccaagaaccaggtgtccctgacttgcctcgtgaagggcttctacccctccgatatcgccgtggaatgggagtccaacggccagcctgagaacaactacaagaccacccctcccgtgctggactccgacggctcattcttcctgtacagcaagctgacagtggataagtcccggtggcagcaggggaacgtgttctcctgctccgtgatgcacgaggctctgcacaaccactacacacagaagtccctgtctctgtcccctggc

SEQ ID NO: 230 - DNA, 1341 bp, Artificial Sequence
  Synthetic: mAb-CD73.9-Vh-hHC-IgG2-C219S
caggtgcagctggtggagtctgggggaggcgtggtccagcctgggaggtccctgagactctcctgtgcaagctctggattcaccttcagtaactatggcatgcactgggtccgccaggctccaggcaaggggctggagtgggtggcagttatatggtatgattccagtaataaatactatccagactccgtgaagggccgattcaccatctccagagacaattccaagaacacgctgtatctgcaaatgaacagcctgagagccgaggacacggctgtgtattactgtgcgagagggggcagcagctggtaccctgattcttttgatatctggggccaaggaacaatggtcaccgtctcttcagcgtcgaccaagggcccctctgtgtttcctctggccccttgctcccggtccacctctgagtctaccgctgctctgggctgcctggtcaaggactacttccccgagcctgtgaccgtgtcctggaactctggcgctctgacctccggcgtgcacacctttccagccgtgctgcagtcctccggcctgtactctctgtcctccgtcgtgaccgtgccctcctccaacttcggcacccagacctacacctgtaacgtggaccacaagccctccaacaccaaggtggacaagaccgtggaacggaagtcctgcgtggaatgccctccttgccctgcacctcctgtggctggcccttccgtgttcctgttccccccaaagcccaaggacaccctgatgatctcccggacccccgaagtgacctgcgtggtggtggatgtgtcccacgaggaccccgaggtgcagttcaattggtacgtggacggcgtggaagtgcacaacgccaagaccaagcccagagaggaacagttcaactccaccttccgggtggtgtccgtgctgaccgtggtgcaccaggactggctgaacggcaaagagtacaagtgcaaggtgtccaacaagggcctgcctgcccccatcgaaaagaccatctccaagacaaagggccagccccgcgagcctcaggtgtacacactgcctcccagccgggaagagatgaccaagaaccaggtgtccctgacctgtctggtcaagggcttctacccctccgatatcgccgtggaatgggagtccaacggccagcccgagaacaactacaagaccaccccccccatgctggactccgacggctcattcttcctgtactccaagctgacagtggacaagtcccggtggcagcagggcaacgtgttctcctgctctgtgatgcacgaggccctgcacaaccactacacccagaagtccctgtccctgagccccggcaaa

SEQ ID NO: 231 - DNA, 1341 bp, Artificial Sequence
  Synthetic: mAb-CD73.9-Vh-hHC-IgG2-C219S-IgG1.1f
caggtgcagctggtggagtctgggggaggcgtggtccagcctgggaggtccctgagactctcctgtgcaagctctggattcaccttcagtaactatggcatgcactgggtccgccaggctccaggcaaggggctggagtgggtggcagttatatggtatgattccagtaataaatactatccagactccgtgaagggccgattcaccatctccagagacaattccaagaacacgctgtatctgcaaatgaacagcctgagagccgaggacacggctgtgtattactgtgcgagagggggcagcagctggtaccctgattcttttgatatctggggccaaggaacaatggtcaccgtctcttcagcgtcgaccaagggcccatcggtcttccccctggcgccctgctccaggagcacctccgagagcacagcggccctgggctgcctggtcaaggactacttccccgaaccggtgacggtgtcgtggaactcaggcgctctgaccagcggcgtgcacaccttcccagctgtcctacagtcctcaggactctactccctcagcagcgtggtgaccgtgccctccagcaacttcggcacccagacctacacctgcaacgtagatcacaagcccagcaacaccaaggtggacaagacagttgagcgcaaatcctgtgtcgagtgcccaccgtgcccagcaccacctgtggcaggaccgtcagtcttcctcttccccccaaaacccaaggacaccctcatgatctcccggacccctgaggtcacatgcgtggtggtggacgtgagccacgaagaccctgaggtcaagttcaactggtacgtggacggcgtggaggtgcataatgccaagacaaagccgcgggaggagcagtacaacagcacgtaccgtgtggtcagcgtcctcaccgtcctgcaccaggactggctgaatggcaaggagtacaagtgcaaggtctccaacaaagccctcccaagcagcatcgagaaaaccatctccaaagccaaagggcagccccgagaaccacaggtgtacaccctgcccccatcccgggaggagatgaccaagaaccaggtcagcctgacctgcctggtcaaaggcttctatcccagcgacatcgccgtggagtgggagagcaatgggcagccggagaacaactacaagaccacgcctcccgtgctggactccgacggctccttcttcctctatagcaagctcaccgtggacaagagcaggtggcagcaggggaacgtcttctcatgctccgtgatgcatgaggctctgcacaaccactacacgcagaagagcctctccctgtccccgggtaaa

SEQ ID NO: 232 - DNA, 1350 bp, Artificial Sequence
  Synthetic: mAb-CD73.10-Vh-hHC-IgG1.1f
caggtgcagctggtggagtctgggggaggcgtggtccagcctgggaggtccctgagactctcctgtgcagcctctggattcaccttcagtaactatggcatgcactgggtccgccaggctccaggcaaggggctggagtgggtggcagttatatggtatgatgagagtaataaatactatccagactccgtgaagggccgattcaccatctccagagacaattccaagaacacgctgtatctgcaaatgaacagcctgagagccgaggacacggctgtgtattactgtgcgagagggggcagcagctggtaccctgattcttttgatatctggggccaaggaacaatggtcaccgtctcttcagcgtcgaccaagggcccctccgtgtttcctctggccccttccagcaagtccacctctggcggaacagccgctctgggctgcctggtcaaggactacttccccgagcctgtgaccgtgtcctggaactctggcgccctgacatctggcgtgcacaccttccctgctgtgctgcagtctagcggcctgtactccctgtcctccgtcgtgacagtgccctccagctctctgggcacccagacctacatctgcaacgtgaaccacaagccctccaacaccaaggtggacaagcgggtggaacccaagtcctgcgacaagacccatacctgccctccctgccctgctcctgaagctgaaggcgcccctagcgtgttcctgttccctccaaagcccaaggacaccctgatgatctcccggacccctgaagtgacctgcgtggtggtggatgtgtcccacgaggacccagaagtgaagttcaattggtacgtggacggcgtggaagtgcacaacgccaagaccaagcctagagaggaacagtacaactccacctaccgggtggtgtccgtgctgaccgtgctgcaccaggattggctgaacggcaaagagtacaagtgcaaggtgtccaacaaggccctgcctagctccatcgaaaagaccatctccaaggctaagggccagccccgcgagccccaggtgtacacactgcctccatcccgggaagagatgaccaagaaccaggtgtccctgacttgcctcgtgaagggcttctacccctccgatatcgccgtggaatgggagtccaacggccagcctgagaacaactacaagaccacccctcccgtgctggactccgacggctcattcttcctgtacagcaagctgacagtggataagtcccggtggcagcaggggaacgtgttctcctgctccgtgatgcacgaggctctgcacaaccactacacacagaagtccctgtctctgtcccctggc

SEQ ID NO: 233 - DNA, 1341 bp, Artificial Sequence
  Synthetic: mAb-CD73.10-Vh-hHC-IgG2-C219S
caggtgcagctggtggagtctgggggaggcgtggtccagcctgggaggtccctgagactctcctgtgcagcctctggattcaccttcagtaactatggcatgcactgggtccgccaggctccaggcaaggggctggagtgggtggcagttatatggtatgatgagagtaataaatactatccagactccgtgaagggccgattcaccatctccagagacaattccaagaacacgctgtatctgcaaatgaacagcctgagagccgaggacacggctgtgtattactgtgcgagagggggcagcagctggtaccctgattcttttgatatctggggccaaggaacaatggtcaccgtctcttcagcgtcgaccaagggcccctctgtgtttcctctggccccttgctcccggtccacctctgagtctaccgctgctctgggctgcctggtcaaggactacttccccgagcctgtgaccgtgtcctggaactctggcgctctgacctccggcgtgcacacctttccagccgtgctgcagtcctccggcctgtactctctgtcctccgtcgtgaccgtgccctcctccaacttcggcacccagacctacacctgtaacgtggaccacaagccctccaacaccaaggtggacaagaccgtggaacggaagtcctgcgtggaatgccctccttgccctgcacctcctgtggctggcccttccgtgttcctgttccccccaaagcccaaggacaccctgatgatctcccggacccccgaagtgacctgcgtggtggtggatgtgtcccacgaggaccccgaggtgcagttcaattggtacgtggacggcgtggaagtgcacaacgccaagaccaagcccagagaggaacagttcaactccaccttccgggtggtgtccgtgctgaccgtggtgcaccaggactggctgaacggcaaagagtacaagtgcaaggtgtccaacaagggcctgcctgcccccatcgaaaagaccatctccaagacaaagggccagccccgcgagcctcaggtgtacacactgcctcccagccgggaagagatgaccaagaaccaggtgtccctgacctgtctggtcaagggcttctacccctccgatatcgccgtggaatgggagtccaacggccagcccgagaacaactacaagaccaccccccccatgctggactccgacggctcattcttcctgtactccaagctgacagtggacaagtcccggtggcagcagggcaacgtgttctcctgctctgtgatgcacgaggccctgcacaaccactacacccagaagtccctgtccctgagccccggcaaa

SEQ ID NO: 234 - DNA, 1341 bp, Artificial Sequence
  Synthetic: mAb-CD73.10-Vh-hHC-IgG2-C219S-IgG1.1f
caggtgcagctggtggagtctgggggaggcgtggtccagcctgggaggtccctgagactctcctgtgcagcctctggattcaccttcagtaactatggcatgcactgggtccgccaggctccaggcaaggggctggagtgggtggcagttatatggtatgatgagagtaataaatactatccagactccgtgaagggccgattcaccatctccagagacaattccaagaacacgctgtatctgcaaatgaacagcctgagagccgaggacacggctgtgtattactgtgcgagagggggcagcagctggtaccctgattcttttgatatctggggccaaggaacaatggtcaccgtctcttcagcgtcgaccaagggcccatcggtcttccccctggcgccctgctccaggagcacctccgagagcacagcggccctgggctgcctggtcaaggactacttccccgaaccggtgacggtgtcgtggaactcaggcgctctgaccagcggcgtgcacaccttcccagctgtcctacagtcctcaggactctactccctcagcagcgtggtgaccgtgccctccagcaacttcggcacccagacctacacctgcaacgtagatcacaagcccagcaacaccaaggtggacaagacagttgagcgcaaatcctgtgtcgagtgcccaccgtgcccagcaccacctgtggcaggaccgtcagtcttcctcttccccccaaaacccaaggacaccctcatgatctcccggacccctgaggtcacatgcgtggtggtggacgtgagccacgaagaccctgaggtcaagttcaactggtacgtggacggcgtggaggtgcataatgccaagacaaagccgcgggaggagcagtacaacagcacgtaccgtgtggtcagcgtcctcaccgtcctgcaccaggactggctgaatggcaaggagtacaagtgcaaggtctccaacaaagccctcccaagcagcatcgagaaaaccatctccaaagccaaagggcagccccgagaaccacaggtgtacaccctgcccccatcccgggaggagatgaccaagaaccaggtcagcctgacctgcctggtcaaaggcttctatcccagcgacatcgccgtggagtgggagagcaatgggcagccggagaacaactacaagaccacgcctcccgtgctggactccgacggctccttcttcctctatagcaagctcaccgtggacaagagcaggtggcagcaggggaacgtcttctcatgctccgtgatgcatgaggctctgcacaaccactacacgcagaagagcctctccctgtccccgggtaaa

SEQ ID NO: 235 - DNA, 1353 bp, Artificial Sequence
  Synthetic: mAb-CD73.11-Vh-hHC-IgG1.1f
caggtgcagctggtggagtctgggggaggcgtggtccagcctgggaggtccctgagactctcctgtgcagcgtctggattcaccttcagtaactatggcatgcactgggtccgccaggctccaggcaaggggctggagtgggtggcagttatatggtatgatgaaagtaataaatactatgcagactccgtgaagggccgattcaccatctccagagacaattccaagaacacgctgtttctgcaaatgaacagcctgagagccgaggacacggctgtgtattattgtgcgagagggtataacagcaggtggtaccctgatgcttttgatatctggggccaagggacaatggtcaccgtctcttcagcgtcgaccaagggcccctccgtgtttcctctggccccttccagcaagtccacctctggcggaacagccgctctgggctgcctggtcaaggactacttccccgagcctgtgaccgtgtcctggaactctggcgccctgacatctggcgtgcacaccttccctgctgtgctgcagtctagcggcctgtactccctgtcctccgtcgtgacagtgccctccagctctctgggcacccagacctacatctgcaacgtgaaccacaagccctccaacaccaaggtggacaagcgggtggaacccaagtcctgcgacaagacccatacctgccctccctgccctgctcctgaagctgaaggcgcccctagcgtgttcctgttccctccaaagcccaaggacaccctgatgatctcccggacccctgaagtgacctgcgtggtggtggatgtgtcccacgaggacccagaagtgaagttcaattggtacgtggacggcgtggaagtgcacaacgccaagaccaagcctagagaggaacagtacaactccacctaccgggtggtgtccgtgctgaccgtgctgcaccaggattggctgaacggcaaagagtacaagtgcaaggtgtccaacaaggccctgcctagctccatcgaaaagaccatctccaaggctaagggccagccccgcgagccccaggtgtacacactgcctccatcccgggaagagatgaccaagaaccaggtgtccctgacttgcctcgtgaagggcttctacccctccgatatcgccgtggaatgggagtccaacggccagcctgagaacaactacaagaccacccctcccgtgctggactccgacggctcattcttcctgtacagcaagctgacagtggataagtcccggtggcagcaggggaacgtgttctcctgctccgtgatgcacgaggctctgcacaaccactacacacagaagtccctgtctctgtcccctggc

SEQ ID NO: 236 - DNA, 1344 bp, Artificial Sequence
  Synthetic: mAb-CD73.11-Vh-hHC-IgG2-C219S
caggtgcagctggtggagtctgggggaggcgtggtccagcctgggaggtccctgagactctcctgtgcagcgtctggattcaccttcagtaactatggcatgcactgggtccgccaggctccaggcaaggggctggagtgggtggcagttatatggtatgatgaaagtaataaatactatgcagactccgtgaagggccgattcaccatctccagagacaattccaagaacacgctgtttctgcaaatgaacagcctgagagccgaggacacggctgtgtattattgtgcgagagggtataacagcaggtggtaccctgatgcttttgatatctggggccaagggacaatggtcaccgtctcttcagcgtcgaccaagggcccctctgtgtttcctctggccccttgctcccggtccacctctgagtctaccgctgctctgggctgcctggtcaaggactacttccccgagcctgtgaccgtgtcctggaactctggcgctctgacctccggcgtgcacacctttccagccgtgctgcagtcctccggcctgtactctctgtcctccgtcgtgaccgtgccctcctccaacttcggcacccagacctacacctgtaacgtggaccacaagccctccaacaccaaggtggacaagaccgtggaacggaagtcctgcgtggaatgccctccttgccctgcacctcctgtggctggcccttccgtgttcctgttccccccaaagcccaaggacaccctgatgatctcccggacccccgaagtgacctgcgtggtggtggatgtgtcccacgaggaccccgaggtgcagttcaattggtacgtggacggcgtggaagtgcacaacgccaagaccaagcccagagaggaacagttcaactccaccttccgggtggtgtccgtgctgaccgtggtgcaccaggactggctgaacggcaaagagtacaagtgcaaggtgtccaacaagggcctgcctgcccccatcgaaaagaccatctccaagacaaagggccagccccgcgagcctcaggtgtacacactgcctcccagccgggaagagatgaccaagaaccaggtgtccctgacctgtctggtcaagggcttctacccctccgatatcgccgtggaatgggagtccaacggccagcccgagaacaactacaagaccaccccccccatgctggactccgacggctcattcttcctgtactccaagctgacagtggacaagtcccggtggcagcagggcaacgtgttctcctgctctgtgatgcacgaggccctgcacaaccactacacccagaagtccctgtccctgagccccggcaaa

SEQ ID NO: 237 - DNA, 363 bp, Artificial Sequence
  Synthetic: CD73.4 (VH)  Nucleotide sequence
caggtgcagctggtggagtctgggggaggcgtggtccagcctgggaggtccctgagactctcctgtgcagcctctggattcaccttcagtaactatggcatgcactgggtccgccaggctccaggcaaggggctggagtgggtggcagttatattgtatgatggaagtaataaatactatccagactccgtgaagggccgattcaccatctccagagacaattccaagaacacgctgtatctgcaaatgaacagcctgagagccgaggacacggctgtgtattactgtgcgagagggggcagcagctggtaccctgattcttttgatatctggggccaaggaacaatggtcaccgtctcttca

SEQ ID NO: 238 - protein, 106 aa, Artificial Sequence
  Synthetic: 5F8 VK3
EIVLTQSPATLSLSPGERATLSCRASQSVSSYLAWYQQKPGQAPRLLIYDASNRATGIPARFSGSGSGTDFTLTISSLEPEDFAVYYCQQRSNWWTFGQGTKVEIK

SEQ ID NO: 239 - protein, 11 aa, Artificial Sequence
  Synthetic: 5F8 VK3 CDR1
RASQSVSSYLA

SEQ ID NO: 240 - protein, 7 aa, Artificial Sequence
  Synthetic: 5F8 VK3 CDR2
DASNRAT

SEQ ID NO: 241 - protein, 8 aa, Artificial Sequence
  Synthetic: 5F8 VK3 CDR3
QQRSNWWT

SEQ ID NO: 242 - DNA, 357 bp, Artificial Sequence; identical to SEQ ID NO: 155
  Synthetic: 5F8 VK3  Nucleotide sequence

SEQ ID NO: 243 - DNA, 1341 bp, Artificial Sequence
  Synthetic: 11F11  (full length heavy chain)  NT Seq
caggtgcagctggtggagtctgggggaggcgtggtccagcctgggaggtccctgagactctcctgtgcaacgtctggattcaccttcagtaactatggcatgcactgggtccgccaggctccaggcaaggggctggagtgggtggcagttatattgtatgatggaagtaataaatactatccagactccgtgaagggccgattcaccatctccagagacaattccaagaacacgctgtatctgcaaatgaacagcctgagagccgaggacacggctgtgtattactgtgcgagagggggcagcagctggtaccctgattcttttgatatctggggccaaggaacaatggtcaccgtctcttcagcctccaccaagggcccatcggtcttccccctggcgccctgctccaggagcacctccgagagcacagcggccctgggctgcctggtcaaggactacttccccgaaccggtgacggtgtcgtggaactcaggcgctctgaccagcggcgtgcacaccttcccagctgtcctacagtcctcaggactctactccctcagcagcgtggtgaccgtgccctccagcaacttcggcacccagacctacacctgcaacgtagatcacaagcccagcaacaccaaggtggacaagacagttgagcgcaaatgttgtgtcgagtgcccaccgtgcccagcaccacctgtggcaggaccgtcagtcttcctcttccccccaaaacccaaggacaccctcatgatctcccggacccctgaggtcacgtgcgtggtggtggacgtgagccacgaagaccccgaggtccagttcaactggtacgtggacggcgtggaggtgcataatgccaagacaaagccacgggaggagcagttcaacagcacgttccgtgtggtcagcgtcctcaccgttgtgcaccaggactggctgaacggcaaggagtacaagtgcaaggtctccaacaaaggcctcccagcccccatcgagaaaaccatctccaaaaccaaagggcagccccgagaaccacaggtgtacaccctgcccccatcccgggaggagatgaccaagaaccaggtcagcctgacctgcctggtcaaaggcttctaccccagcgacatcgccgtggagtgggagagcaatgggcagccggagaacaactacaagaccacacctcccatgctggactccgacggctccttcttcctctacagcaagctcaccgtggacaagagcaggtggcagcaggggaacgtcttctcatgctccgtgatgcatgaggctctgcacaaccactacacgcagaagagcctctccctgtctccgggtaaa

SEQ ID NO: 244 - DNA, 642 bp, Artificial Sequence
  Synthetic: 11F11  (full length light chain 1)  NT Seq
gaaattgtgttgacacagtctccagccaccctgtctttgtctccaggggaaagagccaccctctcctgcagggccagtcagggtgttagcagctacttagcctggtaccagcagaaacctggccaggctcccaggctcctcatctatgatgcatccaacagggccactggcatcccagccaggttcagtggcagtgggcctgggacagacttcactctcaccatcagcagcctagagcctgaagattttgcagtttattactgtcagcagcgtagcaactggcatctcactttcggcggagggaccaaggtggagatcaaacgaactgtggctgcaccatctgtcttcatcttcccgccatctgatgagcagttgaaatctggaactgcctctgttgtgtgcctgctgaataacttctatcccagagaggccaaagtacagtggaaggtggataacgccctccaatcgggtaactcccaggagagtgtcacagagcaggacagcaaggacagcacctacagcctcagcagcaccctgacgctgagcaaagcagactacgagaaacacaaagtctacgcctgcgaagtcacccatcagggcctgagctcgcccgtcacaaagagcttcaacaggggagagtgt

SEQ ID NO: 245 - DNA, 642 bp, Artificial Sequence
  Synthetic: 11F11  (full length light chain 2)  NT Seq
gacatccagatgacccagtctccatcctcactgtctgcatctgtaggagacagagtcaccatcacttgtcgggcgagtcagggtattagcagctggttagcctggtatcagcagaaaccagagaaagcccctaagtccctgatctatgctgcatccagtttgcaaagtggggtcccatcaaggttcagcggcagtggatctgggacagatttcactctcaccatcagcagcctgcagcctgaagattttgcaacttattactgccaacagtataatagttaccctctcactttcggcggagggaccaaggtggagatcaaacgaactgtggctgcaccatctgtcttcatcttcccgccatctgatgagcagttgaaatctggaactgcctctgttgtgtgcctgctgaataacttctatcccagagaggccaaagtacagtggaaggtggataacgccctccaatcgggtaactcccaggagagtgtcacagagcaggacagcaaggacagcacctacagcctcagcagcaccctgacgctgagcaaagcagactacgagaaacacaaagtctacgcctgcgaagtcacccatcagggcctgagctcgcccgtcacaaagagcttcaacaggggagagtgt

SEQ ID NO: 246 - DNA, 1350 bp, Artificial Sequence
  Synthetic: 4C3 (full length heavy chain)  NT Seq
gaagtgcagctggtggagtctgggggaggcttggtacagcctggcaggtccctgagactctcctgtgcagcctctggattcacctttgatgattatgccatgcactgggtccggcaagctccagggaagggcctggagtgggtctcaggtattagttggaagagtggtagcataggctatgcggactctgtgaagggccgattcaccatctccagagacaacgccaagaactccctgtatctgcaaatgaacagtctgagagctgaggacacggccttgtattactgtgtaaaagggtattacgttattttgactggccttgactactggggccagggaaccctggtcaccgtctcctcagcctccaccaagggcccatcggtcttccccctggcaccctcctccaagagcacctctgggggcacagcggccctgggctgcctggtcaaggactacttccccgaaccggtgacggtgtcgtggaactcaggcgccctgaccagcggcgtgcacaccttcccggctgtcctacagtcctcaggactctactccctcagcagcgtggtgaccgtgccctccagcagcttgggcacccagacctacatctgcaacgtgaatcacaagcccagcaacaccaaggtggacaagaaagttgagcccaaatcttgtgacaaaactcacacatgcccaccgtgcccagcacctgaactcctggggggaccgtcagtcttcctcttccccccaaaacccaaggacaccctcatgatctcccggacccctgaggtcacatgcgtggtggtggacgtgagccacgaagaccctgaggtcaagttcaactggtacgtggacggcgtggaggtgcataatgccaagacaaagccgcgggaggagcagtacaacagcacgtaccgtgtggtcagcgtcctcaccgtcctgcaccaggactggctgaatggcaaggagtacaagtgcaaggtctccaacaaagccctcccagcccccatcgagaaaaccatctccaaagccaaagggcagccccgagaaccacaggtgtacaccctgcccccatcccgggatgagctgaccaagaaccaggtcagcctgacctgcctggtcaaaggcttctatcccagcgacatcgccgtggagtgggagagcaatgggcagccggagaacaactacaagaccacgcctcccgtgctggactccgacggctccttcttcctctacagcaagctcaccgtggacaagagcaggtggcagcaggggaacgtcttctcatgctccgtgatgcatgaggctctgcacaaccactacacgcagaagagcctctccctgtctccgggtaaa

SEQ ID NO: 247 - DNA, 642 bp, Artificial Sequence
  Synthetic: 4C3 (full length light chain 1)  NT Seq
gaaattgtgttgacgcagtctccaggcaccctgtctttgtctccaggggaaagagccaccctctcctgcagggccagtcagagtgttagcagctacttagcctggtaccagcagaaacctggccaggctcccaggctcctcatctatggtgcatccagcagggccactggcatcccagacaggttcagtggcagtgggtctgggacagacttcactctcaccatcagcagactggagcctgaagattttgcagtgtattactgtcagcagtatggtagctcaccgctcactttcggcggagggaccaaggtggagatcaaacgaactgtggctgcaccatctgtcttcatcttcccgccatctgatgagcagttgaaatctggaactgcctctgttgtgtgcctgctgaataacttctatcccagagaggccaaagtacagtggaaggtggataacgccctccaatcgggtaactcccaggagagtgtcacagagcaggacagcaaggacagcacctacagcctcagcagcaccctgacgctgagcaaagcagactacgagaaacacaaagtctacgcctgcgaagtcacccatcagggcctgagctcgcccgtcacaaagagcttcaacaggggagagtgt

SEQ ID NO: 248 - DNA, 642 bp, Artificial Sequence
  Synthetic: 4C3 (full length light chain 2)  NT Seq
gacatccagatgacccagtctccatcctcactgtctgcatctgtaggagacagagtcaccttcacttgtcgggcgagtcagggtattagcagctggttagcctggtatcagcagaaaccagagaaagcccctaagtccctgatctatgctgcatccagtttgcaaagtggggtcccatcaaggttcagcggcagtggatctgggacagatttcactctcaccatcagcagcctgcagcctgaagattttgcaacttattactgccaacagtataatagttaccctccaacgttcggccaggggaccaaggtggaaatcaaacgaactgtggctgcaccatctgtcttcatcttcccgccatctgatgagcagttgaaatctggaactgcctctgttgtgtgcctgctgaataacttctatcccagagaggccaaagtacagtggaaggtggataacgccctccaatcgggtaactcccaggagagtgtcacagagcaggacagcaaggacagcacctacagcctcagcagcaccctgacgctgagcaaagcagactacgagaaacacaaagtctacgcctgcgaagtcacccatcagggcctgagctcgcccgtcacaaagagcttcaacaggggagagtgt

SEQ ID NO: 249 - DNA, 642 bp, Artificial Sequence
  Synthetic: 4C3 (full length light chain 3)  NT Seq
gacatccagatgacccagtctccatcctcactgtctgcatctgtaggagacagagtcaccttcacttgtcgggcgagtcagggtattagcagctggttagcctggtatcagcagaaaccagagaaagcccctaagtccctgatctatgctgcatccagtttgcaaagtggggtcccatcaaggttcagcggcagtggatctgggacagatttcactctcaccatcagcagcctgcagcctgaagattttgcaacttattactgccaacagtataatagttaccctccaacgttcggccaagggaccaaggtggaaatcaaacgaactgtggctgcaccatctgtcttcatcttcccgccatctgatgagcagttgaaatctggaactgcctctgttgtgtgcctgctgaataacttctatcccagagaggccaaagtacagtggaaggtggataacgccctccaatcgggtaactcccaggagagtgtcacagagcaggacagcaaggacagcacctacagcctcagcagcaccctgacgctgagcaaagcagactacgagaaacacaaagtctacgcctgcgaagtcacccatcagggcctgagctcgcccgtcacaaagagcttcaacaggggagagtgt

SEQ ID NO: 250 - DNA, 1344 bp, Artificial Sequence
  Synthetic: 4D4 (full length heavy chain)  NT Seq
caggtgcagctggtggagtctgggggaggcgtggtccagcctgggaggtccctgagactctcctgtgcagcgtctggattcaccttcagtaactatggcatgcactgggtccgccaggctccaggcaaggggctggagtgggtggcagttatatggtatgatgaaagtaataaatactatgcagactccgtgaagggccgattcaccatctccagagacaattccaagaacacgctgtttctgcaaatgaacagcctgagagccgaggacacggctgtgtattattgtgcgagagggtataacagcaggtggtaccctgatgcttttgatatctggggccaagggacaatggtcaccgtctcttcagcctccaccaagggcccatcggtcttccccctggcgccctgctccaggagcacctccgagagcacagcggccctgggctgcctggtcaaggactacttccccgaaccggtgacggtgtcgtggaactcaggcgctctgaccagcggcgtgcacaccttcccagctgtcctacagtcctcaggactctactccctcagcagcgtggtgaccgtgccctccagcaacttcggcacccagacctacacctgcaacgtagatcacaagcccagcaacaccaaggtggacaagacagttgagcgcaaatgttgtgtcgagtgcccaccgtgcccagcaccacctgtggcaggaccgtcagtcttcctcttccccccaaaacccaaggacaccctcatgatctcccggacccctgaggtcacgtgcgtggtggtggacgtgagccacgaagaccccgaggtccagttcaactggtacgtggacggcgtggaggtgcataatgccaagacaaagccacgggaggagcagttcaacagcacgttccgtgtggtcagcgtcctcaccgttgtgcaccaggactggctgaacggcaaggagtacaagtgcaaggtctccaacaaaggcctcccagcccccatcgagaaaaccatctccaaaaccaaagggcagccccgagaaccacaggtgtacaccctgcccccatcccgggaggagatgaccaagaaccaggtcagcctgacctgcctggtcaaaggcttctaccccagcgacatcgccgtggagtgggagagcaatgggcagccggagaacaactacaagaccacacctcccatgctggactccgacggctccttcttcctctacagcaagctcaccgtggacaagagcaggtggcagcaggggaacgtcttctcatgctccgtgatgcatgaggctctgcacaaccactacacgcagaagagcctctccctgtctccgggtaaa

SEQ ID NO: 251 - DNA, 642 bp, Artificial Sequence
  Synthetic: 4D4 (full length light chain 1)  NT Seq
gacatccagatgacccagtctccatcctcactgtctgcatctgtaggagacagagtcaccatcacttgtcgggcgagtcagggtattagcagctggttagcctggtatcagcagaaaccagagaaagcccctaagtccctgatctatgctgcatccagtttgcaaagtggggtcccatcaaggttcagcggcagtggatctgggacagatttcactctcaccatcagcagcctgcagcctgaagattttgcaacttattactgccaacagtataatagttacccgctcactttcggcggagggaccaaggtggagatcaaacgaactgtggctgcaccatctgtcttcatcttcccgccatctgatgagcagttgaaatctggaactgcctctgttgtgtgcctgctgaataacttctatcccagagaggccaaagtacagtggaaggtggataacgccctccaatcgggtaactcccaggagagtgtcacagagcaggacagcaaggacagcacctacagcctcagcagcaccctgacgctgagcaaagcagactacgagaaacacaaagtctacgcctgcgaagtcacccatcagggcctgagctcgcccgtcacaaagagcttcaacaggggagagtgt

SEQ ID NO: 252 - DNA, 1344 bp, Artificial Sequence
  Synthetic: 10D2 (full length heavy chain)  NT Seq
caggtgcagctggtggagtctgggggaggcgtggtccagcctgggaggtccctgagactctcctgtgcagcgtctggattcaccttcagtaactatggcctgcactgggtccgccaggctccaggcaaggggctggagtgggtggcagttatacggtatgatggaagtaataaatactatgcagactccgtgaagggccgattcaccatctccagagacaattccaagaacacgctgtatctgcaaatgagcagcctgagagccgaggacacggctgtgtattactgtgcgagggggggcagcagctggtacccggacggtttggacgtctggggccaagggaccacggtcaccgtctcctcagcttccaccaagggcccatccgtcttccccctggcgccctgctccaggagcacctccgagagcacagccgccctgggctgcctggtcaaggactacttccccgaaccggtgacggtgtcgtggaactcaggcgccctgaccagcggcgtgcacaccttcccggctgtcctacagtcctcaggactctactccctcagcagcgtggtgaccgtgccctccagcagcttgggcacgaagacctacacctgcaacgtagatcacaagcccagcaacaccaaggtggacaagagagttgagtccaaatatggtcccccatgcccatcatgcccagcacctgagttcctggggggaccatcagtcttcctgttccccccaaaacccaaggacactctcatgatctcccggacccctgaggtcacgtgcgtggtggtggacgtgagccaggaagaccccgaggtccagttcaactggtacgtggatggcgtggaggtgcataatgccaagacaaagccgcgggaggagcagttcaacagcacgtaccgtgtggtcagcgtcctcaccgtcctgcaccaggactggctgaacggcaaggagtacaagtgcaaggtctccaacaaaggcctcccgtcctccatcgagaaaaccatctccaaagccaaagggcagccccgagagccacaggtgtacaccctgcccccatcccaggaggagatgaccaagaaccaggtcagcctgacctgcctggtcaaaggcttctaccccagcgacatcgccgtggagtgggagagcaatgggcagccggagaacaactacaagaccacgcctcccgtgctggactccgacggctccttcttcctctacagcaggctaaccgtggacaagagcaggtggcaggaggggaatgtcttctcatgctccgtgatgcatgaggctctgcacaaccactacacacagaagagcctctccctgtctctgggtaaa

SEQ ID NO: 253 - DNA, 639 bp, Artificial Sequence
  Synthetic: 10D2 (full length light chain 1)  NT Seq
gccatccagttgacccagtctccatcctccctgtctgcatctgtaggagacagagtcaccatcacttgccgggcaagtcagggcattagcagtgctttagcctggtatcagcagaaaccagggaaagctcctaagctcctgatctatgatgcctccagtttggaaagtggggtcccatcaaggttcagcggcagtggatctgggacagatttcactctcaccatcagcagcctgcagcctgaagattttgcaacttattactgtcaacagtttaatagttaccccactttcggcggagggaccaaggtggagatcaaacgaactgtggctgcaccatctgtcttcatcttcccgccatctgatgagcagttgaaatctggaactgcctctgttgtgtgcctgctgaataacttctatcccagagaggccaaagtacagtggaaggtggataacgccctccaatcgggtaactcccaggagagtgtcacagagcaggacagcaaggacagcacctacagcctcagcagcaccctgacgctgagcaaagcagactacgagaaacacaaagtctacgcctgcgaagtcacccatcagggcctgagctcgcccgtcacaaagagcttcaacaggggagagtgt

SEQ ID NO: 254 - DNA, 642 bp, Artificial Sequence; identical to SEQ ID NO: 251
  Synthetic: 10D2 (full length light chain 2)  NT Seq

SEQ ID NO: 255 - DNA, 1350 bp, Artificial Sequence
  Synthetic: 11A6 (full length heavy chain)  NT Seq
gaagtgcagctggtggaatctgggggaaacttggtacagcctggcaggtccctgagactctcctgtgcagcctctggattcacctttgatgattatgccatgcactgggtccggcaagctccagggaagggcctggagtgggtctcaggtattagttggaataataatgacataggctatgcggactctgtgaagggccgattcatcatctccagagacaacgccaagaactccctgtatctgcaaatgaacagtctgagacctgaggacacggccttgtattattgtgtaaaaggttattacgttattttgactggtcttgactactggggccagggaaccccggtcaccgtctcctcagcctccaccaagggcccatcggtcttccccctggcaccctcctccaagagcacctctgggggcacagcggccctgggctgcctggtcaaggactacttccccgaaccggtgacggtgtcgtggaactcaggcgccctgaccagcggcgtgcacaccttcccggctgtcctacagtcctcaggactctactccctcagcagcgtggtgaccgtgccctccagcagcttgggcacccagacctacatctgcaacgtgaatcacaagcccagcaacaccaaggtggacaagaaagttgagcccaaatcttgtgacaaaactcacacatgcccaccgtgcccagcacctgaactcctggggggaccgtcagtcttcctcttccccccaaaacccaaggacaccctcatgatctcccggacccctgaggtcacatgcgtggtggtggacgtgagccacgaagaccctgaggtcaagttcaactggtacgtggacggcgtggaggtgcataatgccaagacaaagccgcgggaggagcagtacaacagcacgtaccgtgtggtcagcgtcctcaccgtcctgcaccaggactggctgaatggcaaggagtacaagtgcaaggtctccaacaaagccctcccagcccccatcgagaaaaccatctccaaagccaaagggcagccccgagaaccacaggtgtacaccctgcccccatcccgggatgagctgaccaagaaccaggtcagcctgacctgcctggtcaaaggcttctatcccagcgacatcgccgtggagtgggagagcaatgggcagccggagaacaactacaagaccacgcctcccgtgctggactccgacggctccttcttcctctacagcaagctcaccgtggacaagagcaggtggcagcaggggaacgtcttctcatgctccgtgatgcatgaggctctgcacaaccactacacgcagaagagcctctccctgtctccgggtaaa

SEQ ID NO: 256 - DNA, 642 bp, Artificial Sequence; identical to SEQ ID NO: 251
  Synthetic: 11A6 (full length light chain 1)  NT Seq

SEQ ID NO: 257 - DNA, 1344 bp, Artificial Sequence
  Synthetic: 24H2 (full length heavy chain)  NT Seq
caggtgcaactggtggagtctgggggaggcgtggtccagcctgggaggtccctgagactctcctgtgcagcgtctggattcaccttcagtaactatggcatgcactgggtccgccaggctccaggcaaggggctggagtgggtggcagttatatggtatgatggaggtaataaatactatgcagactccgtgaagggccgattcaccatctccagagacaattccaagaacacgctgtttctgcaaatgaacagcctgagagccgaagacacggctgtgtattactgtgcgagagggggcagcagctggtaccctgatgcttttgatatctggggccaagggacaatggtcaccgtctcttcagcttccaccaagggcccatccgtcttccccctggcgccctgctccaggagcacctccgagagcacagccgccctgggctgcctggtcaaggactacttccccgaaccggtgacggtgtcgtggaactcaggcgccctgaccagcggcgtgcacaccttcccggctgtcctacagtcctcaggactctactccctcagcagcgtggtgaccgtgccctccagcagcttgggcacgaagacctacacctgcaacgtagatcacaagcccagcaacaccaaggtggacaagagagttgagtccaaatatggtcccccatgcccatcatgcccagcacctgagttcctggggggaccatcagtcttcctgttccccccaaaacccaaggacactctcatgatctcccggacccctgaggtcacgtgcgtggtggtggacgtgagccaggaagaccccgaggtccagttcaactggtacgtggatggcgtggaggtgcataatgccaagacaaagccgcgggaggagcagttcaacagcacgtaccgtgtggtcagcgtcctcaccgtcctgcaccaggactggctgaacggcaaggagtacaagtgcaaggtctccaacaaaggcctcccgtcctccatcgagaaaaccatctccaaagccaaagggcagccccgagagccacaggtgtacaccctgcccccatcccaggaggagatgaccaagaaccaggtcagcctgacctgcctggtcaaaggcttctaccccagcgacatcgccgtggagtgggagagcaatgggcagccggagaacaactacaagaccacgcctcccgtgctggactccgacggctccttcttcctctacagcaggctaaccgtggacaagagcaggtggcaggaggggaatgtcttctcatgctccgtgatgcatgaggctctgcacaaccactacacacagaagagcctctccctgtctctgggtaaa

SEQ ID NO: 258 - DNA, 642 bp, Artificial Sequence; identical to SEQ ID NO: 245
  Synthetic: 24H2 (full length light chain 1)  NT Seq

SEQ ID NO: 259 - DNA, 1347 bp, Artificial Sequence
  Synthetic: 5F8 (full length heavy chain)  NT Seq
gaggtgcagctggtggagtccgggggaggcttagttcagcctggggggtccctgagactctcctgtgcagcctctggattcaccttcagtagctactggatgcactgggtccgccaagctccagggaaggggctggtgtgggtctcacgtattattagtgatgggagtagcacaggttacgcggattccgtgaagggccgattcaccatctccagagacaacgccaagaacacgctgtatctgcaaatgaacagtctgagagccgaggacacggctgtgtattactgtgcaagagagtttagcagtggctggtactttgactactggggccagggaaccctggtcaccgtctcctcagcctccaccaagggcccatcggtcttccccctggcaccctcctccaagagcacctctgggggcacagcggccctgggctgcctggtcaaggactacttccccgaaccggtgacggtgtcgtggaactcaggcgccctgaccagcggcgtgcacaccttcccggctgtcctacagtcctcaggactctactccctcagcagcgtggtgaccgtgccctccagcagcttgggcacccagacctacatctgcaacgtgaatcacaagcccagcaacaccaaggtggacaagaaagttgagcccaaatcttgtgacaaaactcacacatgcccaccgtgcccagcacctgaactcctggggggaccgtcagtcttcctcttccccccaaaacccaaggacaccctcatgatctcccggacccctgaggtcacatgcgtggtggtggacgtgagccacgaagaccctgaggtcaagttcaactggtacgtggacggcgtggaggtgcataatgccaagacaaagccgcgggaggagcagtacaacagcacgtaccgtgtggtcagcgtcctcaccgtcctgcaccaggactggctgaatggcaaggagtacaagtgcaaggtctccaacaaagccctcccagcccccatcgagaaaaccatctccaaagccaaagggcagccccgagaaccacaggtgtacaccctgcccccatcccgggatgagctgaccaagaaccaggtcagcctgacctgcctggtcaaaggcttctatcccagcgacatcgccgtggagtgggagagcaatgggcagccggagaacaactacaagaccacgcctcccgtgctggactccgacggctccttcttcctctacagcaagctcaccgtggacaagagcaggtggcagcaggggaacgtcttctcatgctccgtgatgcatgaggctctgcacaaccactacacgcagaagagcctctccctgtctccgggtaaa

SEQ ID NO: 260 - DNA, 642 bp, Artificial Sequence
  Synthetic: 5F8 (full length light chain 1)  NT Seq
gccatccagttgacccagtctccatcctccctgtctgcatctgtaggagacagagtcaccatcacttgccgggcaagtcagggcattagcagtgctttagcctggtatcagcagaaaccagggaaagctcctaagctcctgatctatgatgcctccagtttggaaagtggggtcccatcaaggttcagcggcagtggatctgggacagatttcactctcaccatcagcagcctgcagcctgaagattttgcaacttattactgtcaacagtttagtagttaccctcggacgttcggccaagggaccaaggtggaaatcaaacgaactgtggctgcaccatctgtcttcatcttcccgccatctgatgagcagttgaaatctggaactgcctctgttgtgtgcctgctgaataacttctatcccagagaggccaaagtacagtggaaggtggataacgccctccaatcgggtaactcccaggagagtgtcacagagcaggacagcaaggacagcacctacagcctcagcagcaccctgacgctgagcaaagcagactacgagaaacacaaagtctacgcctgcgaagtcacccatcagggcctgagctcgcccgtcacaaagagcttcaacaggggagagtgt

SEQ ID NO: 261 - DNA, 642 bp, Artificial Sequence
  Synthetic: 5F8 (full length light chain 2)  NT Seq
gacatccagatgacccagtctccatcctcactgtctgcatctgtaggagacagagtcaccatcacttgtcgggcgagtcagggtattagcagctggttagcctggtatcagcagaaaccagagaaagcccctaagtccctgatctatgctgcatccagtttgcaaagtggggtcccatcaaggttcagcggcagtggatctgggacaggtttcactctcaccatcagcagcctgcagcctgaagattttgcaacttattactgccaacagtataatagttaccctcggacgttcggccaagggaccaaggtggaaatcaaacgaactgtggctgcaccatctgtcttcatcttcccgccatctgatgagcagttgaaatctggaactgcctctgttgtgtgcctgctgaataacttctatcccagagaggccaaagtacagtggaaggtggataacgccctccaatcgggtaactcccaggagagtgtcacagagcaggacagcaaggacagcacctacagcctcagcagcaccctgacgctgagcaaagcagactacgagaaacacaaagtctacgcctgcgaagtcacccatcagggcctgagctcgcccgtcacaaagagcttcaacaggggagagtgt

SEQ ID NO: 262 - DNA, 1353 bp, Artificial Sequence
  Synthetic: 6E11 (full length heavy chain)  NT Seq
gaagtgcagctggtggagtctgggggagccttggtacagcctggcaggtccctgagactctcctgtgcagcctctggattcacctttgatgattatgccatgcactgggtccggcaagctccagggaagggcctggagtgggtctcaggtattacttggaatagtggtggcataggctacgcggactctgtgaagggccgattcaccatctccagagacaacgccaagaactccctgtatctgcaaatgaacagtctgagagctgaggacacggccttgtattactgtgcaaaagataggtattacagcagttggctcctctttgacaactggggccagggaattctggtcaccgtctcctcagcctccaccaagggcccatcggtcttccccctggcaccctcctccaagagcacctctgggggcacagcggccctgggctgcctggtcaaggactacttccccgaaccggtgacggtgtcgtggaactcaggcgccctgaccagcggcgtgcacaccttcccggctgtcctacagtcctcaggactctactccctcagcagcgtggtgaccgtgccctccagcagcttgggcacccagacctacatctgcaacgtgaatcacaagcccagcaacaccaaggtggacaagaaagttgagcccaaatcttgtgacaaaactcacacatgcccaccgtgcccagcacctgaactcctggggggaccgtcagtcttcctcttccccccaaaacccaaggacaccctcatgatctcccggacccctgaggtcacatgcgtggtggtggacgtgagccacgaagaccctgaggtcaagttcaactggtacgtggacggcgtggaggtgcataatgccaagacaaagccgcgggaggagcagtacaacagcacgtaccgtgtggtcagcgtcctcaccgtcctgcaccaggactggctgaatggcaaggagtacaagtgcaaggtctccaacaaagccctcccagcccccatcgagaaaaccatctccaaagccaaagggcagccccgagaaccacaggtgtacaccctgcccccatcccgggatgagctgaccaagaaccaggtcagcctgacctgcctggtcaaaggcttctatcccagcgacatcgccgtggagtgggagagcaatgggcagccggagaacaactacaagaccacgcctcccgtgctggactccgacggctccttcttcctctacagcaagctcaccgtggacaagagcaggtggcagcaggggaacgtcttctcatgctccgtgatgcatgaggctctgcacaaccactacacgcagaagagcctctccctgtctccgggtaaa

SEQ ID NO: 263 - DNA, 642 bp, Artificial Sequence
  Synthetic: 6E11 (full length light chain 1)  NT Seq
gaaattgtgttgacgcagtctccaggcaccctgtctttgtctccaggggaaagagccaccctctcctgcagggccagtcagagtgttagcagcagctacttagcctggtaccagcagaaacctggccaggctcccaggctcctcatctatggtgcatccagcagggccactggcatcccagacaggttcagtggcagtgggtctgggacagacttcactctcaccatcagcagactggagcctgaagattttgcagtgtattactgtcagcattatggtagctcattcactttcggccctgggaccaaagtggatatcaaacgaactgtggctgcaccatctgtcttcatcttcccgccatctgatgagcagttgaaatctggaactgcctctgttgtgtgcctgctgaataacttctatcccagagaggccaaagtacagtggaaggtggataacgccctccaatcgggtaactcccaggagagtgtcacagagcaggacagcaaggacagcacctacagcctcagcagcaccctgacgctgagcaaagcagactacgagaaacacaaagtctacgcctgcgaagtcacccatcagggcctgagctcgcccgtcacaaagagcttcaacaggggagagtgt

SEQ ID NO: 264 - DNA, 1353 bp, Artificial Sequence
  Synthetic: 7A11 (full length heavy chain)  NT Seq
gaagtgcagctggtggagtctgggggaggcttggtacagactggcaggtccctgagactctcctgtgcagcctctggattcacctttgatgattatgccatgcactgggtccggcaagctccagggaagggcctggagtgggtctcagatattagttggaatagtgatattataggctatgcggactctgtgaagggccgattcaccatctctagagacaacgccaagaactccctgtatctgcaaatgaacagtctgagagctgaggacacggccttgtattactgtgcaaaagatatttatggttcggggagttctttttttgactactggggccagggaatcctggtcaccgtctcctcagcctccaccaagggcccatcggtcttccccctggcaccctcctccaagagcacctctgggggcacagcggccctgggctgcctggtcaaggactacttccccgaaccggtgacggtgtcgtggaactcaggcgccctgaccagcggcgtgcacaccttcccggctgtcctacagtcctcaggactctactccctcagcagcgtggtgaccgtgccctccagcagcttgggcacccagacctacatctgcaacgtgaatcacaagcccagcaacaccaaggtggacaagaaagttgagcccaaatcttgtgacaaaactcacacatgcccaccgtgcccagcacctgaactcctggggggaccgtcagtcttcctcttccccccaaaacccaaggacaccctcatgatctcccggacccctgaggtcacatgcgtggtggtggacgtgagccacgaagaccctgaggtcaagttcaactggtacgtggacggcgtggaggtgcataatgccaagacaaagccgcgggaggagcagtacaacagcacgtaccgtgtggtcagcgtcctcaccgtcctgcaccaggactggctgaatggcaaggagtacaagtgcaaggtctccaacaaagccctcccagcccccatcgagaaaaccatctccaaagccaaagggcagccccgagaaccacaggtgtacaccctgcccccatcccgggatgagctgaccaagaaccaggtcagcctgacctgcctggtcaaaggcttctatcccagcgacatcgccgtggagtgggagagcaatgggcagccggagaacaactacaagaccacgcctcccgtgctggactccgacggctccttcttcctctacagcaagctcaccgtggacaagagcaggtggcagcaggggaacgtcttctcatgctccgtgatgcatgaggctctgcacaaccactacacgcagaagagcctctccctgtctccgggtaaa

SEQ ID NO: 265 - DNA, 642 bp, Artificial Sequence
  Synthetic: 7A11 (full length light chain 1)  NT Seq
gacatccagatgacccagtctccatcctcactgtctgcatctgtaggagacagagtcaccatcacttgtcgggcgagtcagtatattagcagctggttagcctggtatcagcagaaaccagagaaagcccctaagtccctgatctatgctgcatccagtttgcaaagtggggtcccatcaaggttcagcggcagtggatctgggacagatttcactctcaccatcagcagcctgcagcctgaagattttgcaacttattactgccaacagtatcatagttaccctcccaccttcggccaagggacacgactggagattaaacgaactgtggctgcaccatctgtcttcatcttcccgccatctgatgagcagttgaaatctggaactgcctctgttgtgtgcctgctgaataacttctatcccagagaggccaaagtacagtggaaggtggataacgccctccaatcgggtaactcccaggagagtgtcacagagcaggacagcaaggacagcacctacagcctcagcagcaccctgacgctgagcaaagcagactacgagaaacacaaagtctacgcctgcgaagtcacccatcagggcctgagctcgcccgtcacaaagagcttcaacaggggagagtgt

SEQ ID NO: 266 - DNA, 1341 bp, Artificial Sequence
  Synthetic: CD73.4.IgG2C219SIgG1.1f  Alternative NT Seq
caggtgcagctggtggagtctgggggaggcgtggtccagcctgggaggtccctgagactctcctgtgcagcctctggattcaccttcagtaactatggcatgcactgggtccgccaggctccaggcaaggggctggagtgggtggcagttatattgtatgatggaagtaataaatactatccagactccgtgaagggccgattcaccatctccagagacaattccaagaacacgctgtatctgcaaatgaacagcctgagagccgaggacacggctgtgtattactgtgcgagagggggcagcagctggtaccctgattcttttgatatctggggccaaggaacaatggtcaccgtctcttcagcgtcgaccaagggcccatcggtcttccccctggcgccctgctccaggagcacctccgagagcacagcggccctgggctgcctggtcaaggactacttccccgaaccggtgacggtgtcgtggaactcaggcgctctgaccagcggcgtgcacaccttcccagctgtcctacagtcctcaggactctactccctcagcagcgtggtgaccgtgccctccagcaacttcggcacccagacctacacctgcaacgtagatcacaagcccagcaacaccaaggtggacaagacagttgagcgcaaatcctgtgtcgagtgcccaccgtgcccagcaccacctgtggcaggaccgtcagtcttcctcttccccccaaaacccaaggacaccctcatgatctcccggacccctgaggtcacatgcgtggtggtggacgtgagccacgaagaccctgaggtcaagttcaactggtacgtggacggcgtggaggtgcataatgccaagacaaagccgcgggaggagcagtacaacagcacgtaccgtgtggtcagcgtcctcaccgtcctgcaccaggactggctgaatggcaaggagtacaagtgcaaggtctccaacaaagccctcccaagcagcatcgagaaaaccatctccaaagccaaagggcagccccgagaaccacaggtgtacaccctgcccccatcccgggaggagatgaccaagaaccaggtcagcctgacctgcctggtcaaaggcttctatcccagcgacatcgccgtggagtgggagagcaatgggcagccggagaacaactacaagaccacgcctcccgtgctggactccgacggctccttcttcctctatagcaagctcaccgtggacaagagcaggtggcagcaggggaacgtcttctcatgctccgtgatgcatgaggctctgcacaaccactacacgcagaagagcctctccctgtccccgggttga

SEQ ID NO: 267 - protein, 330 aa, Artificial Sequence
  Synthetic: IgG1f
ASTKGPSVFPLAPSSKSTSGGTAALGCLVKDYFPEPVTVSWNSGALTSGVHTFPAVLQSSGLYSLSSVVTVPSSSLGTQTYICNVNHKPSNTKVDKRVEPKSCDKTHTCPPCPAPELLGGPSVFLFPPKPKDTLMISRTPEVTCVVVDVSHEDPEVKFNWYVDGVEVHNAKTKPREEQYNSTYRVVSVLTVLHQDWLNGKEYKCKVSNKALPAPIEKTISKAKGQPREPQVYTLPPSREEMTKNQVSLTCLVKGFYPSDIAVEWESNGQPENNYKTTPPVLDSDGSFFLYSKLTVDKSRWQQGNVFSCSVMHEALHNHYTQKSLSLSPGK

SEQ ID NO: 268 - protein, 326 aa, Artificial Sequence
  Synthetic: IgG2.3
ASTKGPSVFPLAPCSRSTSESTAALGCLVKDYFPEPVTVSWNSGALTSGVHTFPAVLQSSGLYSLSSVVTVPSSNFGTQTYTCNVDHKPSNTKVDKTVERKSCVECPPCPAPPVAGPSVFLFPPKPKDTLMISRTPEVTCVVVDVSHEDPEVQFNWYVDGVEVHNAKTKPREEQFNSTFRVVSVLTVVHQDWLNGKEYKCKVSNKGLPAPIEKTISKTKGQPREPQVYTLPPSREEMTKNQVSLTCLVKGFYPSDIAVEWESNGQPENNYKTTPPMLDSDGSFFLYSKLTVDKSRWQQGNVFSCSVMHEALHNHYTQKSLSLSPGK

SEQ ID NO: 269 - protein, 327 aa, Artificial Sequence; identical to SEQ ID NO: 183
  Synthetic: IgG2.3G1-AY

SEQ ID NO: 270 - protein, 326 aa, Artificial Sequence; identical to SEQ ID NO: 165
  Synthetic: IgG2.3G1-KH

SEQ ID NO: 271 - protein, 326 aa, Artificial Sequence
  Synthetic: IgG2.5
ASTKGPSVFPLAPSSRSTSESTAALGCLVKDYFPEPVTVSWNSGALTSGVHTFPAVLQSSGLYSLSSVVTVPSSNFGTQTYTCNVDHKPSNTKVDKTVERKCCVECPPCPAPPVAGPSVFLFPPKPKDTLMISRTPEVTCVVVDVSHEDPEVQFNWYVDGVEVHNAKTKPREEQFNSTFRVVSVLTVVHQDWLNGKEYKCKVSNKGLPAPIEKTISKTKGQPREPQVYTLPPSREEMTKNQVSLTCLVKGFYPSDIAVEWESNGQPENNYKTTPPMLDSDGSFFLYSKLTVDKSRWQQGNVFSCSVMHEALHNHYTQKSLSLSPGK

SEQ ID NO: 272 - protein, 330 aa, Artificial Sequence
  Synthetic: IgG1.1f
ASTKGPSVFPLAPSSKSTSGGTAALGCLVKDYFPEPVTVSWNSGALTSGVHTFPAVLQSSGLYSLSSVVTVPSSSLGTQTYICNVNHKPSNTKVDKRVEPKSCDKTHTCPPCPAPEAEGAPSVFLFPPKPKDTLMISRTPEVTCVVVDVSHEDPEVKFNWYVDGVEVHNAKTKPREEQYNSTYRVVSVLTVLHQDWLNGKEYKCKVSNKALPSSIEKTISKAKGQPREPQVYTLPPSREEMTKNQVSLTCLVKGFYPSDIAVEWESNGQPENNYKTTPPVLDSDGSFFLYSKLTVDKSRWQQGNVFSCSVMHEALHNHYTQKSLSLSPGK

SEQ ID NO: 273 - protein, 326 aa, Artificial Sequence; identical to SEQ ID NO: 169
  Synthetic: IgG2.3G1.1f-KH

SEQ ID NO: 274 - protein, 327 aa, Artificial Sequence
  Synthetic: IgG1-deltaTHT
ASTKGPSVFPLAPSSKSTSGGTAALGCLVKDYFPEPVTVSWNSGALTSGVHTFPAVLQSSGLYSLSSVVTVPSSSLGTQTYICNVNHKPSNTKVDKRVEPKSCDKCPPCPAPELLGGPSVFLFPPKPKDTLMISRTPEVTCVVVDVSHEDPEVKFNWYVDGVEVHNAKTKPREEQYNSTYRVVSVLTVLHQDWLNGKEYKCKVSNKALPAPIEKTISKAKGQPREPQVYTLPPSREEMTKNQVSLTCLVKGFYPSDIAVEWESNGQPENNYKTTPPVLDSDGSFFLYSKLTVDKSRWQQGNVFSCSVMHEALHNHYTQKSLSLSPGK

SEQ ID NO: 275 - protein, 329 aa, Artificial Sequence
  Synthetic: IgG2.3-plusTHT
ASTKGPSVFPLAPCSRSTSESTAALGCLVKDYFPEPVTVSWNSGALTSGVHTFPAVLQSSGLYSLSSVVTVPSSNFGTQTYTCNVDHKPSNTKVDKTVERKSCVETHTCPPCPAPPVAGPSVFLFPPKPKDTLMISRTPEVTCVVVDVSHEDPEVQFNWYVDGVEVHNAKTKPREEQFNSTFRVVSVLTVVHQDWLNGKEYKCKVSNKGLPAPIEKTISKTKGQPREPQVYTLPPSREEMTKNQVSLTCLVKGFYPSDIAVEWESNGQPENNYKTTPPMLDSDGSFFLYSKLTVDKSRWQQGNVFSCSVMHEALHNHYTQKSLSLSPGK

SEQ ID NO: 276 - protein, 329 aa, Artificial Sequence
  Synthetic: IgG2.3-plusGGG
ASTKGPSVFPLAPCSRSTSESTAALGCLVKDYFPEPVTVSWNSGALTSGVHTFPAVLQSSGLYSLSSVVTVPSSNFGTQTYTCNVDHKPSNTKVDKTVERKSCVEGGGCPPCPAPPVAGPSVFLFPPKPKDTLMISRTPEVTCVVVDVSHEDPEVQFNWYVDGVEVHNAKTKPREEQFNSTFRVVSVLTVVHQDWLNGKEYKCKVSNKGLPAPIEKTISKTKGQPREPQVYTLPPSREEMTKNQVSLTCLVKGFYPSDIAVEWESNGQPENNYKTTPPMLDSDGSFFLYSKLTVDKSRWQQGNVFSCSVMHEALHNHYTQKSLSLSPGK

SEQ ID NO: 277 - protein, 326 aa, Artificial Sequence
  Synthetic: IgG2.5G1.1f-KH
ASTKGPSVFPLAPSSRSTSESTAALGCLVKDYFPEPVTVSWNSGALTSGVHTFPAVLQSSGLYSLSSVVTVPSSNFGTQTYTCNVDHKPSNTKVDKTVERKCCVECPPCPAPPVAGPSVFLFPPKPKDTLMISRTPEVTCVVVDVSHEDPEVKFNWYVDGVEVHNAKTKPREEQYNSTYRVVSVLTVLHQDWLNGKEYKCKVSNKALPSSIEKTISKAKGQPREPQVYTLPPSREEMTKNQVSLTCLVKGFYPSDIAVEWESNGQPENNYKTTPPVLDSDGSFFLYSKLTVDKSRWQQGNVFSCSVMHEALHNHYTQKSLSLSPGK

SEQ ID NO: 278 - protein, 327 aa, Artificial Sequence
  Synthetic: IgG2.5G1-AY
ASTKGPSVFPLAPSSRSTSESTAALGCLVKDYFPEPVTVSWNSGALTSGVHTFPAVLQSSGLYSLSSVVTVPSSNFGTQTYTCNVDHKPSNTKVDKTVERKCCVECPPCPAPELLGGPSVFLFPPKPKDTLMISRTPEVTCVVVDVSHEDPEVKFNWYVDGVEVHNAKTKPREEQYNSTYRVVSVLTVLHQDWLNGKEYKCKVSNKALPAPIEKTISKAKGQPREPQVYTLPPSREEMTKNQVSLTCLVKGFYPSDIAVEWESNGQPENNYKTTPPVLDSDGSFFLYSKLTVDKSRWQQGNVFSCSVMHEALHNHYTQKSLSLSPGK

SEQ ID NO: 279 - protein, 326 aa, Artificial Sequence
  Synthetic: IgG2.5G1-KH
ASTKGPSVFPLAPSSRSTSESTAALGCLVKDYFPEPVTVSWNSGALTSGVHTFPAVLQSSGLYSLSSVVTVPSSNFGTQTYTCNVDHKPSNTKVDKTVERKCCVECPPCPAPPVAGPSVFLFPPKPKDTLMISRTPEVTCVVVDVSHEDPEVKFNWYVDGVEVHNAKTKPREEQYNSTYRVVSVLTVLHQDWLNGKEYKCKVSNKALPAPIEKTISKAKGQPREPQVYTLPPSREEMTKNQVSLTCLVKGFYPSDIAVEWESNGQPENNYKTTPPVLDSDGSFFLYSKLTVDKSRWQQGNVFSCSVMHEALHNHYTQKSLSLSPGK

SEQ ID NO: 280 - protein, 329 aa, Artificial Sequence
  Synthetic: IgG2.5-plusTHT
ASTKGPSVFPLAPSSRSTSESTAALGCLVKDYFPEPVTVSWNSGALTSGVHTFPAVLQSSGLYSLSSVVTVPSSNFGTQTYTCNVDHKPSNTKVDKTVERKCCVETHTCPPCPAPPVAGPSVFLFPPKPKDTLMISRTPEVTCVVVDVSHEDPEVQFNWYVDGVEVHNAKTKPREEQFNSTFRVVSVLTVVHQDWLNGKEYKCKVSNKGLPAPIEKTISKTKGQPREPQVYTLPPSREEMTKNQVSLTCLVKGFYPSDIAVEWESNGQPENNYKTTPPMLDSDGSFFLYSKLTVDKSRWQQGNVFSCSVMHEALHNHYTQKSLSLSPGK

SEQ ID NO: 281 - protein, 327 aa, Artificial Sequence
  Synthetic: IgG1-G2.3G1-AY
ASTKGPSVFPLAPSSKSTSGGTAALGCLVKDYFPEPVTVSWNSGALTSGVHTFPAVLQSSGLYSLSSVVTVPSSSLGTQTYICNVNHKPSNTKVDKRVERKSCVECPPCPAPELLGGPSVFLFPPKPKDTLMISRTPEVTCVVVDVSHEDPEVKFNWYVDGVEVHNAKTKPREEQYNSTYRVVSVLTVLHQDWLNGKEYKCKVSNKALPAPIEKTISKAKGQPREPQVYTLPPSREEMTKNQVSLTCLVKGFYPSDIAVEWESNGQPENNYKTTPPVLDSDGSFFLYSKLTVDKSRWQQGNVFSCSVMHEALHNHYTQKSLSLSPGK

SEQ ID NO: 282 - protein, 326 aa, Artificial Sequence
  Synthetic: IgG1-G2.3G1-KH
ASTKGPSVFPLAPSSKSTSGGTAALGCLVKDYFPEPVTVSWNSGALTSGVHTFPAVLQSSGLYSLSSVVTVPSSSLGTQTYICNVNHKPSNTKVDKRVERKSCVECPPCPAPPVAGPSVFLFPPKPKDTLMISRTPEVTCVVVDVSHEDPEVKFNWYVDGVEVHNAKTKPREEQYNSTYRVVSVLTVLHQDWLNGKEYKCKVSNKALPAPIEKTISKAKGQPREPQVYTLPPSREEMTKNQVSLTCLVKGFYPSDIAVEWESNGQPENNYKTTPPVLDSDGSFFLYSKLTVDKSRWQQGNVFSCSVMHEALHNHYTQKSLSLSPGK

SEQ ID NO: 283 - protein, 553 aa, Artificial Sequence
  Synthetic: CD73 from Figure 27A
  misc_feature (1)..(1): Xaa can be any naturally occurring amino acid
XCPRAARAPATLLLALGAVLWPAAGAWELTILHTNDVHSRLEQTSEDSSKCVNASRCMGGVARLFTKVQQIRRAEPNVLLLDAGDQYQGTIWFTVYKGAEVAHFMNALRYDAMALGNHEFDNGVEGLIEPLLKEAKFPILSANIKAKGPLASQISGLYLPYKVLPVGDEVVGIVGYTSKETPFLSNPGTNLVFEDEITALQPEVDKLKTLNVNKIIALGHSGFEMDKLIAQKVRGVDVVVGGHSNTFLYTGNPPSKEVPAGKYPFIVTSDDGRKVPVVQAYAFGKYLGYLKIEFDERGNVISSHGNPILLNSSIPEDPSIKADINKWRIKLDNYSTQELGKTIVYLDGSSQSCRFRECNMGNLICDAMINNNLRHADETFWNHVSMCILNGGGIRSPIDERNNGTITWENLAAVLPFGGTFDLVQLKGSTLKKAFEHSVHRYGQSTGEFLQVGGIHVVYDLSRKPGDRVVKLDVLCTKCRVPSYDPLKMDEVYKVILPNFLANGGDGFQMIKDELLRHDSGDQDINVVSTYISKMKVIYPAVEGRIKHHHHHH

SEQ ID NO: 284 - protein, 5 aa, Artificial Sequence
  Synthetic: Hinge region amino acid
VDKRV

SEQ ID NO: 285 - protein, 5 aa, Artificial Sequence
  Synthetic: Hinge region amino acid
VDKTV

SEQ ID NO: 286 - protein, 10 aa, Artificial Sequence
  Synthetic: Hinge region amino acid
EPKSCDKTHT

SEQ ID NO: 287 - protein, 12 aa, Artificial Sequence
  Synthetic: Hinge region amino acid
ELKTPLGDTTHT

SEQ ID NO: 288 - protein, 4 aa, Artificial Sequence
  Synthetic: Hinge region amino acid
EPKS

SEQ ID NO: 289 - protein, 7 aa, Artificial Sequence
  Synthetic: Hinge region amino acid
ESKYGPP

SEQ ID NO: 290 - protein, 5 aa, Artificial Sequence
  Synthetic: Hinge region amino acid
CPPCP

SEQ ID NO: 291 - protein, 9 aa, Artificial Sequence
  Synthetic: Hinge region amino acid
CCVECPPCP

SEQ ID NO: 292 - protein, 50 aa, Artificial Sequence
  Synthetic: Hinge region amino acid
CPRCPEPKSCDTPPPCPRCPEPKSCDTPPPCPRCPEPKSCDTPPPCPRCP

SEQ ID NO: 293 - protein, 35 aa, Artificial Sequence
  Synthetic: Hinge region amino acid
CPRCPEPKSCDTPPPCPRCPEPKSCDTPPPCPRCP

SEQ ID NO: 294 - protein, 20 aa, Artificial Sequence
  Synthetic: Hinge region amino acid
CPRCPEPKSCDTPPPCPRCP

SEQ ID NO: 295 - protein, 41 aa, Artificial Sequence
  Synthetic: Hinge region amino acid
CDTPPPCPRCPEPKSCDTPPPCPRCPEPKSCDTPPPCPRCP

SEQ ID NO: 296 - protein, 11 aa, Artificial Sequence
  Synthetic: Hinge region amino acid
CDTPPPCPRCP

SEQ ID NO: 297 - protein, 5 aa, Artificial Sequence
  Synthetic: Hinge region amino acid
CPSCP

SEQ ID NO: 298 - protein, 7 aa, Artificial Sequence
  Synthetic: Hinge region amino acid
APELLGG

SEQ ID NO: 299 - protein, 6 aa, Artificial Sequence
  Synthetic: Hinge region amino acid
APPVAG

SEQ ID NO: 300 - protein, 330 aa, Artificial Sequence
  Synthetic: G2-G1-G1-G1
ASTKGPSVFPLAPCSRSTSESTAALGCLVKDYFPEPVTVSWNSGALTSGVHTFPAVLQSSGLYSLSSVVTVPSSNFGTQTYTCNVDHKPSNTKVDKTVERKSCDKTHTCPPCPAPELLGGPSVFLFPPKPKDTLMISRTPEVTCVVVDVSHEDPEVKFNWYVDGVEVHNAKTKPREEQYNSTYRVVSVLTVLHQDWLNGKEYKCKVSNKALPAPIEKTISKAKGQPREPQVYTLPPSREEMTKNQVSLTCLVKGFYPSDIAVEWESNGQPENNYKTTPPVLDSDGSFFLYSKLTVDKSRWQQGNVFSCSVMHEALHNHYTQKSLSLSPGK

SEQ ID NO: 301 - protein, 330 aa, Artificial Sequence
  Synthetic: G2.5-G1-G1-G1
ASTKGPSVFPLAPSSRSTSESTAALGCLVKDYFPEPVTVSWNSGALTSGVHTFPAVLQSSGLYSLSSVVTVPSSNFGTQTYTCNVDHKPSNTKVDKTVERKSCDKTHTCPPCPAPELLGGPSVFLFPPKPKDTLMISRTPEVTCVVVDVSHEDPEVKFNWYVDGVEVHNAKTKPREEQYNSTYRVVSVLTVLHQDWLNGKEYKCKVSNKALPAPIEKTISKAKGQPREPQVYTLPPSREEMTKNQVSLTCLVKGFYPSDIAVEWESNGQPENNYKTTPPVLDSDGSFFLYSKLTVDKSRWQQGNVFSCSVMHEALHNHYTQKSLSLSPGK

SEQ ID NO: 302 - protein, 326 aa, Artificial Sequence
  Synthetic: G1-G2.3-G2-G2
ASTKGPSVFPLAPSSKSTSGGTAALGCLVKDYFPEPVTVSWNSGALTSGVHTFPAVLQSSGLYSLSSVVTVPSSSLGTQTYICNVNHKPSNTKVDKRVEPKSCVECPPCPAPPVAGPSVFLFPPKPKDTLMISRTPEVTCVVVDVSHEDPEVQFNWYVDGVEVHNAKTKPREEQFNSTFRVVSVLTVVHQDWLNGKEYKCKVSNKGLPAPIEKTISKTKGQPREPQVYTLPPSREEMTKNQVSLTCLVKGFYPSDIAVEWESNGQPENNYKTTPPMLDSDGSFFLYSKLTVDKSRWQQGNVFSCSVMHEALHNHYTQKSLSLSPGK

SEQ ID NO: 303 - protein, 330 aa, Artificial Sequence
  Synthetic: G1-KRGEGSSNLF
ASTKGPSVFPLAPSSRSTSESTAALGCLVKDYFPEPVTVSWNSGALTSGVHTFPAVLQSSGLYSLSSVVTVPSSNFGTQTYICNVNHKPSNTKVDKRVEPKSCDKTHTCPPCPAPELLGGPSVFLFPPKPKDTLMISRTPEVTCVVVDVSHEDPEVKFNWYVDGVEVHNAKTKPREEQYNSTYRVVSVLTVLHQDWLNGKEYKCKVSNKALPAPIEKTISKAKGQPREPQVYTLPPSREEMTKNQVSLTCLVKGFYPSDIAVEWESNGQPENNYKTTPPVLDSDGSFFLYSKLTVDKSRWQQGNVFSCSVMHEALHNHYTQKSLSLSPGK

SEQ ID NO: 304 - protein, 330 aa, Artificial Sequence
  Synthetic: G1-KRGEGS
ASTKGPSVFPLAPSSRSTSESTAALGCLVKDYFPEPVTVSWNSGALTSGVHTFPAVLQSSGLYSLSSVVTVPSSSLGTQTYICNVNHKPSNTKVDKRVEPKSCDKTHTCPPCPAPELLGGPSVFLFPPKPKDTLMISRTPEVTCVVVDVSHEDPEVKFNWYVDGVEVHNAKTKPREEQYNSTYRVVSVLTVLHQDWLNGKEYKCKVSNKALPAPIEKTISKAKGQPREPQVYTLPPSREEMTKNQVSLTCLVKGFYPSDIAVEWESNGQPENNYKTTPPVLDSDGSFFLYSKLTVDKSRWQQGNVFSCSVMHEALHNHYTQKSLSLSPGK

SEQ ID NO: 305 - protein, 330 aa, Artificial Sequence
  Synthetic: G1-SNLF
ASTKGPSVFPLAPSSKSTSGGTAALGCLVKDYFPEPVTVSWNSGALTSGVHTFPAVLQSSGLYSLSSVVTVPSSNFGTQTYICNVNHKPSNTKVDKRVEPKSCDKTHTCPPCPAPELLGGPSVFLFPPKPKDTLMISRTPEVTCVVVDVSHEDPEVKFNWYVDGVEVHNAKTKPREEQYNSTYRVVSVLTVLHQDWLNGKEYKCKVSNKALPAPIEKTISKAKGQPREPQVYTLPPSREEMTKNQVSLTCLVKGFYPSDIAVEWESNGQPENNYKTTPPVLDSDGSFFLYSKLTVDKSRWQQGNVFSCSVMHEALHNHYTQKSLSLSPGK

SEQ ID NO: 306 - protein, 330 aa, Artificial Sequence
  Synthetic: IgG1-ITNDRTPR
ASTKGPSVFPLAPSSKSTSGGTAALGCLVKDYFPEPVTVSWNSGALTSGVHTFPAVLQSSGLYSLSSVVTVPSSSLGTQTYTCNVDHKPSNTKVDKTVERKSCDKTHTCPPCPAPELLGGPSVFLFPPKPKDTLMISRTPEVTCVVVDVSHEDPEVKFNWYVDGVEVHNAKTKPREEQYNSTYRVVSVLTVLHQDWLNGKEYKCKVSNKALPAPIEKTISKAKGQPREPQVYTLPPSREEMTKNQVSLTCLVKGFYPSDIAVEWESNGQPENNYKTTPPVLDSDGSFFLYSKLTVDKSRWQQGNVFSCSVMHEALHNHYTQKSLSLSPGK

SEQ ID NO: 307 - protein, 329 aa, Artificial Sequence
  Synthetic: G1-SNLFPR
ASTKGPSVFPLAPSSKSTSGGTAALGCLVKDYFPEPVTVSWNSGALTSGVHTFPAVLQSSGLYSLSSVVTVPSSNFGTQTYICNVNHKPSNTKVDKRVERKSCDKTHTCPPCPAPELLGGPSVFLFPPKPKDTLMISRTPEVTCVVVDVSHEDPEVKFNWYVDGVEVHNAKTKPREEQYNSTYRVVSVLTVLHQDWLNGKEYKCKVSNKALPAPIEKTISKAKGQPREPQVYTLPPSREEMTKNQVSLTCLVKGFYPSDIAVEWESNGQPENNYKTTPPVLDSDGSFFLYSKLTVDKSRWQQGNVFSCSVMHEALHNHYTQKSLSLSPG

SEQ ID NO: 308 - protein, 326 aa, Artificial Sequence
  Synthetic: G2-RKEGSGNSFL
ASTKGPSVFPLAPCSKSTSGGTAALGCLVKDYFPEPVTVSWNSGALTSGVHTFPAVLQSSGLYSLSSVVTVPSSSLGTQTYTCNVDHKPSNTKVDKTVERKSCVECPPCPAPPVAGPSVFLFPPKPKDTLMISRTPEVTCVVVDVSHEDPEVQFNWYVDGVEVHNAKTKPREEQFNSTFRVVSVLTVVHQDWLNGKEYKCKVSNKGLPAPIEKTISKTKGQPREPQVYTLPPSREEMTKNQVSLTCLVKGFYPSDIAVEWESNGQPENNYKTTPPMLDSDGSFFLYSKLTVDKSRWQQGNVFSCSVMHEALHNHYTQKSLSLSPGK

SEQ ID NO: 309 - protein, 326 aa, Artificial Sequence
  Synthetic: G2-RKEGSG
ASTKGPSVFPLAPCSKSTSGGTAALGCLVKDYFPEPVTVSWNSGALTSGVHTFPAVLQSSGLYSLSSVVTVPSSNFGTQTYTCNVDHKPSNTKVDKTVERKSCVECPPCPAPPVAGPSVFLFPPKPKDTLMISRTPEVTCVVVDVSHEDPEVQFNWYVDGVEVHNAKTKPREEQFNSTFRVVSVLTVVHQDWLNGKEYKCKVSNKGLPAPIEKTISKTKGQPREPQVYTLPPSREEMTKNQVSLTCLVKGFYPSDIAVEWESNGQPENNYKTTPPMLDSDGSFFLYSKLTVDKSRWQQGNVFSCSVMHEALHNHYTQKSLSLSPGK

SEQ ID NO: 310 - protein, 326 aa, Artificial Sequence
  Synthetic: G2-NSFL
ASTKGPSVFPLAPCSRSTSESTAALGCLVKDYFPEPVTVSWNSGALTSGVHTFPAVLQSSGLYSLSSVVTVPSSSLGTQTYTCNVDHKPSNTKVDKTVERKSCVECPPCPAPPVAGPSVFLFPPKPKDTLMISRTPEVTCVVVDVSHEDPEVQFNWYVDGVEVHNAKTKPREEQFNSTFRVVSVLTVVHQDWLNGKEYKCKVSNKGLPAPIEKTISKTKGQPREPQVYTLPPSREEMTKNQVSLTCLVKGFYPSDIAVEWESNGQPENNYKTTPPMLDSDGSFFLYSKLTVDKSRWQQGNVFSCSVMHEALHNHYTQKSLSLSPGK

SEQ ID NO: 311 - protein, 326 aa, Artificial Sequence
  Synthetic: IgG2-TIDNTRRP
ASTKGPSVFPLAPCSRSTSESTAALGCLVKDYFPEPVTVSWNSGALTSGVHTFPAVLQSSGLYSLSSVVTVPSSNFGTQTYICNVNHKPSNTKVDKRVEPKSCVECPPCPAPPVAGPSVFLFPPKPKDTLMISRTPEVTCVVVDVSHEDPEVQFNWYVDGVEVHNAKTKPREEQFNSTFRVVSVLTVVHQDWLNGKEYKCKVSNKGLPAPIEKTISKTKGQPREPQVYTLPPSREEMTKNQVSLTCLVKGFYPSDIAVEWESNGQPENNYKTTPPMLDSDGSFFLYSKLTVDKSRWQQGNVFSCSVMHEALHNHYTQKSLSLSPGK

SEQ ID NO: 312 - protein, 326 aa, Artificial Sequence
  Synthetic: G2-NSFLRP
ASTKGPSVFPLAPCSRSTSESTAALGCLVKDYFPEPVTVSWNSGALTSGVHTFPAVLQSSGLYSLSSVVTVPSSSLGTQTYTCNVDHKPSNTKVDKTVEPKSCVECPPCPAPPVAGPSVFLFPPKPKDTLMISRTPEVTCVVVDVSHEDPEVQFNWYVDGVEVHNAKTKPREEQFNSTFRVVSVLTVVHQDWLNGKEYKCKVSNKGLPAPIEKTISKTKGQPREPQVYTLPPSREEMTKNQVSLTCLVKGFYPSDIAVEWESNGQPENNYKTTPPMLDSDGSFFLYSKLTVDKSRWQQGNVFSCSVMHEALHNHYTQKSLSLSPGK

SEQ ID NO: 313 - protein, 330 aa, Artificial Sequence
  Synthetic: G1-G1-G2-G1-AY
ASTKGPSVFPLAPSSKSTSGGTAALGCLVKDYFPEPVTVSWNSGALTSGVHTFPAVLQSSGLYSLSSVVTVPSSSLGTQTYICNVNHKPSNTKVDKRVEPKSCDKTHTCPPCPAPELLGGPSVFLFPPKPKDTLMISRTPEVTCVVVDVSHEDPEVQFNWYVDGVEVHNAKTKPREEQFNSTFRVVSVLTVVHQDWLNGKEYKCKVSNKGLPAPIEKTISKTKGQPREPQVYTLPPSREEMTKNQVSLTCLVKGFYPSDIAVEWESNGQPENNYKTTPPVLDSDGSFFLYSKLTVDKSRWQQGNVFSCSVMHEALHNHYTQKSLSLSPGK

SEQ ID NO: 314 - protein, 329 aa, Artificial Sequence
  Synthetic: G1-G1-G2-G1-KH
ASTKGPSVFPLAPSSKSTSGGTAALGCLVKDYFPEPVTVSWNSGALTSGVHTFPAVLQSSGLYSLSSVVTVPSSSLGTQTYICNVNHKPSNTKVDKRVEPKSCDKTHTCPPCPAPPVAGPSVFLFPPKPKDTLMISRTPEVTCVVVDVSHEDPEVQFNWYVDGVEVHNAKTKPREEQFNSTFRVVSVLTVVHQDWLNGKEYKCKVSNKGLPAPIEKTISKTKGQPREPQVYTLPPSREEMTKNQVSLTCLVKGFYPSDIAVEWESNGQPENNYKTTPPVLDSDGSFFLYSKLTVDKSRWQQGNVFSCSVMHEALHNHYTQKSLSLSPGK

SEQ ID NO: 315 - protein, 326 aa, Artificial Sequence
  Synthetic: G2-G2.3-G1-G2-KH
ASTKGPSVFPLAPCSRSTSESTAALGCLVKDYFPEPVTVSWNSGALTSGVHTFPAVLQSSGLYSLSSVVTVPSSNFGTQTYTCNVDHKPSNTKVDKTVERKSCVECPPCPAPPVAGPSVFLFPPKPKDTLMISRTPEVTCVVVDVSHEDPEVKFNWYVDGVEVHNAKTKPREEQYNSTYRVVSVLTVLHQDWLNGKEYKCKVSNKALPAPIEKTISKAKGQPREPQVYTLPPSREEMTKNQVSLTCLVKGFYPSDIAVEWESNGQPENNYKTTPPMLDSDGSFFLYSKLTVDKSRWQQGNVFSCSVMHEALHNHYTQKSLSLSPGK

SEQ ID NO: 316 - protein, 326 aa, Artificial Sequence
  Synthetic: G2.5-G2.3-G1-G2-KH
ASTKGPSVFPLAPSSRSTSESTAALGCLVKDYFPEPVTVSWNSGALTSGVHTFPAVLQSSGLYSLSSVVTVPSSNFGTQTYTCNVDHKPSNTKVDKTVERKSCVECPPCPAPPVAGPSVFLFPPKPKDTLMISRTPEVTCVVVDVSHEDPEVKFNWYVDGVEVHNAKTKPREEQYNSTYRVVSVLTVLHQDWLNGKEYKCKVSNKALPAPIEKTISKAKGQPREPQVYTLPPSREEMTKNQVSLTCLVKGFYPSDIAVEWESNGQPENNYKTTPPMLDSDGSFFLYSKLTVDKSRWQQGNVFSCSVMHEALHNHYTQKSLSLSPGK

SEQ ID NO: 317 - protein, 326 aa, Artificial Sequence
  Synthetic: G2-G2.3-G1-G2-AY
ASTKGPSVFPLAPCSRSTSESTAALGCLVKDYFPEPVTVSWNSGALTSGVHTFPAVLQSSGLYSLSSVVTVPSSNFGTQTYTCNVDHKPSNTKVDKTVERKSCVECPPCPAPELLGGPSVFLFPPKPKDTLMISRTPEVTCVVVDVSHEDPEVKFNWYVDGVEVHNAKTKPREEQYNSTYRVVSVLTVLHQDWLNGKEYKCKVSNKALPAPIEKTISKAKGQPREPQVYTLPPSREEMTKNQVSLTCLVKGFYPSDIAVEWESNGQPENNYKTTPPMLDSDGSFFLYSKLTVDKSRWQQGNVFSCSVMHEALHNHYTQKSLSLSPG

SEQ ID NO: 318 - protein, 327 aa, Artificial Sequence
  Synthetic: G2.5-G2.3-G1-G2-AY
ASTKGPSVFPLAPSSRSTSESTAALGCLVKDYFPEPVTVSWNSGALTSGVHTFPAVLQSSGLYSLSSVVTVPSSNFGTQTYTCNVDHKPSNTKVDKTVERKSCVECPPCPAPELLGGPSVFLFPPKPKDTLMISRTPEVTCVVVDVSHEDPEVKFNWYVDGVEVHNAKTKPREEQYNSTYRVVSVLTVLHQDWLNGKEYKCKVSNKALPAPIEKTISKAKGQPREPQVYTLPPSREEMTKNQVSLTCLVKGFYPSDIAVEWESNGQPENNYKTTPPMLDSDGSFFLYSKLTVDKSRWQQGNVFSCSVMHEALHNHYTQKSLSLSPGK

SEQ ID NO: 319 - protein, 326 aa, Artificial Sequence
  Synthetic: G1-G2.3-G1-G1-KH
ASTKGPSVFPLAPSSKSTSGGTAALGCLVKDYFPEPVTVSWNSGALTSGVHTFPAVLQSSGLYSLSSVVTVPSSSLGTQTYICNVNHKPSNTKVDKRVEPKSCVECPPCPAPPVAGPSVFLFPPKPKDTLMISRTPEVTCVVVDVSHEDPEVKFNWYVDGVEVHNAKTKPREEQYNSTYRVVSVLTVLHQDWLNGKEYKCKVSNKALPAPIEKTISKAKGQPREPQVYTLPPSREEMTKNQVSLTCLVKGFYPSDIAVEWESNGQPENNYKTTPPVLDSDGSFFLYSKLTVDKSRWQQGNVFSCSVMHEALHNHYTQKSLSLSPGK

SEQ ID NO: 320 - protein, 330 aa, Artificial Sequence
  Synthetic: G2-G1-G2-G2-AY
ASTKGPSVFPLAPCSRSTSESTAALGCLVKDYFPEPVTVSWNSGALTSGVHTFPAVLQSSGLYSLSSVVTVPSSNFGTQTYTCNVDHKPSNTKVDKTVERKSCDKTHTCPPCPAPELLGGPSVFLFPPKPKDTLMISRTPEVTCVVVDVSHEDPEVQFNWYVDGVEVHNAKTKPREEQFNSTFRVVSVLTVVHQDWLNGKEYKCKVSNKGLPAPIEKTISKTKGQPREPQVYTLPPSREEMTKNQVSLTCLVKGFYPSDIAVEWESNGQPENNYKTTPPMLDSDGSFFLYSKLTVDKSRWQQGNVFSCSVMHEALHNHYTQKSLSLSPGK

SEQ ID NO: 321 - protein, 330 aa, Artificial Sequence
  Synthetic: G2.5-G1-G2-G2-AY
ASTKGPSVFPLAPSSRSTSESTAALGCLVKDYFPEPVTVSWNSGALTSGVHTFPAVLQSSGLYSLSSVVTVPSSNFGTQTYTCNVDHKPSNTKVDKTVERKSCDKTHTCPPCPAPELLGGPSVFLFPPKPKDTLMISRTPEVTCVVVDVSHEDPEVQFNWYVDGVEVHNAKTKPREEQFNSTFRVVSVLTVVHQDWLNGKEYKCKVSNKGLPAPIEKTISKTKGQPREPQVYTLPPSREEMTKNQVSLTCLVKGFYPSDIAVEWESNGQPENNYKTTPPMLDSDGSFFLYSKLTVDKSRWQQGNVFSCSVMHEALHNHYTQKSLSLSPGK

SEQ ID NO: 322 - protein, 327 aa, Artificial Sequence
  Synthetic: G1-G2-G1-G1-AY
ASTKGPSVFPLAPSSKSTSGGTAALGCLVKDYFPEPVTVSWNSGALTSGVHTFPAVLQSSGLYSLSSVVTVPSSSLGTQTYICNVNHKPSNTKVDKRVEPKSCVECPPCPAPELLGGPSVFLFPPKPKDTLMISRTPEVTCVVVDVSHEDPEVKFNWYVDGVEVHNAKTKPREEQYNSTYRVVSVLTVLHQDWLNGKEYKCKVSNKALPAPIEKTISKAKGQPREPQVYTLPPSREEMTKNQVSLTCLVKGFYPSDIAVEWESNGQPENNYKTTPPVLDSDGSFFLYSKLTVDKSRWQQGNVFSCSVMHEALHNHYTQKSLSLSPGK

SEQ ID NO: 323 - protein, 328 aa, Artificial Sequence
  Synthetic: G2-G1-G2-G2-KH
ASTKGPSVFPLAPCSRSTSESTAALGCLVKDYFPEPVTVSWNSGALTSGVHTFPAVLQSSGLYSLSSVVTVPSSNFGTQTYTCNVDHKPSNTKVDKTVERKSCDKTHTCPPCPAPPVAGPSVFLFPPKPKDTLMISRTPEVTCVVVDVSHEDPEVQFNWYVDGVEVHNAKTKPREEQFNSTFRVVSVLTVVHQDWLNGKEYKCKVSNKGLPAPIEKTISKTKGQPREPQVYTLPPSREEMTKNQVSLTCLVKGFYPSDIAVEWESNGQPENNYKTTPPMLDSDGSFFLYSKLTVDKSRWQQGNVFSCSVMHEALHNHYTQKSLSLSPG

SEQ ID NO: 324 - protein, 329 aa, Artificial Sequence
  Synthetic: G2.5-G1-G2-G2-KH
ASTKGPSVFPLAPSSRSTSESTAALGCLVKDYFPEPVTVSWNSGALTSGVHTFPAVLQSSGLYSLSSVVTVPSSNFGTQTYTCNVDHKPSNTKVDKTVERKSCDKTHTCPPCPAPPVAGPSVFLFPPKPKDTLMISRTPEVTCVVVDVSHEDPEVQFNWYVDGVEVHNAKTKPREEQFNSTFRVVSVLTVVHQDWLNGKEYKCKVSNKGLPAPIEKTISKTKGQPREPQVYTLPPSREEMTKNQVSLTCLVKGFYPSDIAVEWESNGQPENNYKTTPPMLDSDGSFFLYSKLTVDKSRWQQGNVFSCSVMHEALHNHYTQKSLSLSPGK

SEQ ID NO: 325 - protein, 323 aa, Artificial Sequence
  Synthetic: IgG1-deltaHinge
ASTKGPSVFPLAPSSKSTSGGTAALGCLVKDYFPEPVTVSWNSGALTSGVHTFPAVLQSSGLYSLSSVVTVPSSSLGTQTYICNVNHKPSNTKVDKRVEPKCPPCPAPELLGGPSVFLFPPKPKDTLMISRTPEVTCVVVDVSHEDPEVKFNWYVDGVEVHNAKTKPREEQYNSTYRVVSVLTVLHQDWLNGKEYKCKVSNKALPAPIEKTISKAKGQPREPQVYTLPPSREEMTKNQVSLTCLVKGFYPSDIAVEWESNGQPENNYKTTPPVLDSDGSFFLYSKLTVDKSRWQQGNVFSCSVMHEALHNHYTQKSLSLSPGK

SEQ ID NO: 326 - protein, 322 aa, Artificial Sequence
  Synthetic: IgG2-deltaHinge
ASTKGPSVFPLAPCSRSTSESTAALGCLVKDYFPEPVTVSWNSGALTSGVHTFPAVLQSSGLYSLSSVVTVPSSNFGTQTYTCNVDHKPSNTKVDKTVERKCPPCPAPPVAGPSVFLFPPKPKDTLMISRTPEVTCVVVDVSHEDPEVQFNWYVDGVEVHNAKTKPREEQFNSTFRVVSVLTVVHQDWLNGKEYKCKVSNKGLPAPIEKTISKTKGQPREPQVYTLPPSREEMTKNQVSLTCLVKGFYPSDIAVEWESNGQPENNYKTTPPMLDSDGSFFLYSKLTVDKSRWQQGNVFSCSVMHEALHNHYTQKSLSLSPGK

SEQ ID NO: 327 - protein, 322 aa, Artificial Sequence
  Synthetic: IgG2.5-deltaHinge
ASTKGPSVFPLAPSSRSTSESTAALGCLVKDYFPEPVTVSWNSGALTSGVHTFPAVLQSSGLYSLSSVVTVPSSNFGTQTYTCNVDHKPSNTKVDKTVERKCPPCPAPPVAGPSVFLFPPKPKDTLMISRTPEVTCVVVDVSHEDPEVQFNWYVDGVEVHNAKTKPREEQFNSTFRVVSVLTVVHQDWLNGKEYKCKVSNKGLPAPIEKTISKTKGQPREPQVYTLPPSREEMTKNQVSLTCLVKGFYPSDIAVEWESNGQPENNYKTTPPMLDSDGSFFLYSKLTVDKSRWQQGNVFSCSVMHEALHNHYTQKSLSLSPGK

SEQ ID NO: 328 - protein, 328 aa, Artificial Sequence
  Synthetic: IgG1-deltaG237
ASTKGPSVFPLAPSSKSTSGGTAALGCLVKDYFPEPVTVSWNSGALTSGVHTFPAVLQSSGLYSLSSVVTVPSSSLGTQTYICNVNHKPSNTKVDKRVEPKSCDKTHTCPPCPAPELLGPSVFLFPPKPKDTLMISRTPEVTCVVVDVSHEDPEVKFNWYVDGVEVHNAKTKPREEQYNSTYRVVSVLTVLHQDWLNGKEYKCKVSNKALPAPIEKTISKAKGQPREPQVYTLPPSREEMTKNQVSLTCLVKGFYPSDIAVEWESNGQPENNYKTTPPVLDSDGSFFLYSKLTVDKSRWQQGNVFSCSVMHEALHNHYTQKSLSLSPG

SEQ ID NO: 329 - protein, 327 aa, Artificial Sequence
  Synthetic: IgG2-plusG237
ASTKGPSVFPLAPCSRSTSESTAALGCLVKDYFPEPVTVSWNSGALTSGVHTFPAVLQSSGLYSLSSVVTVPSSNFGTQTYTCNVDHKPSNTKVDKTVERKSCVECPPCPAPPVAGGPSVFLFPPKPKDTLMISRTPEVTCVVVDVSHEDPEVQFNWYVDGVEVHNAKTKPREEQFNSTFRVVSVLTVVHQDWLNGKEYKCKVSNKGLPAPIEKTISKTKGQPREPQVYTLPPSREEMTKNQVSLTCLVKGFYPSDIAVEWESNGQPENNYKTTPPMLDSDGSFFLYSKLTVDKSRWQQGNVFSCSVMHEALHNHYTQKSLSLSPGK

SEQ ID NO: 330 - protein, 326 aa, Artificial Sequence
  Synthetic: IgG2.4
ASTKGPSVFPLAPCSRSTSESTAALGCLVKDYFPEPVTVSWNSGALTSGVHTFPAVLQSSGLYSLSSVVTVPSSNFGTQTYTCNVDHKPSNTKVDKTVERKCSVECPPCPAPPVAGPSVFLFPPKPKDTLMISRTPEVTCVVVDVSHEDPEVQFNWYVDGVEVHNAKTKPREEQFNSTFRVVSVLTVVHQDWLNGKEYKCKVSNKGLPAPIEKTISKTKGQPREPQVYTLPPSREEMTKNQVSLTCLVKGFYPSDIAVEWESNGQPENNYKTTPPMLDSDGSFFLYSKLTVDKSRWQQGNVFSCSVMHEALHNHYTQKSLSLSPGK

SEQ ID NO: 331 - protein, 326 aa, Artificial Sequence
  Synthetic: IgG2.3/4
ASTKGPSVFPLAPCSRSTSESTAALGCLVKDYFPEPVTVSWNSGALTSGVHTFPAVLQSSGLYSLSSVVTVPSSNFGTQTYTCNVDHKPSNTKVDKTVERKSSVECPPCPAPPVAGPSVFLFPPKPKDTLMISRTPEVTCVVVDVSHEDPEVQFNWYVDGVEVHNAKTKPREEQFNSTFRVVSVLTVVHQDWLNGKEYKCKVSNKGLPAPIEKTISKTKGQPREPQVYTLPPSREEMTKNQVSLTCLVKGFYPSDIAVEWESNGQPENNYKTTPPMLDSDGSFFLYSKLTVDKSRWQQGNVFSCSVMHEALHNHYTQKSLSLSPGK

SEQ ID NO: 332 - protein, 326 aa, Artificial Sequence
  Synthetic: IgG2.3-V13
ASTKGPSVFPLAPCSRSTSESTAALGCLVKDYFPEPVTVSWNSGALTSGVHTFPAVLQSSGLYSLSSVVTVPSSNFGTQTYTCNVDHKPSNTKVDKTVERKSCVECPPCPAPPVAGDSVFLFPPKPKDTLMISRTPEVTCVVVDVSHEDPEVQFNWYVDGVEVHNAKTKPREEQFNSTFRVVSVLTVVHQDWLNGKEYKCKVSNKGLPAPIEKTISKTKGQPREPQVYTLPPSREEMTKNQVSLTCLVKGFYPSDIAVEWESNGQPENNYKTTPPMLDSDGSFFLYSKLTVDKSRWQQGNVFSCSVMHEALHNHYTQKSLSLSPGK

SEQ ID NO: 333 - protein, 326 aa, Artificial Sequence
  Synthetic: IgG2.3-V14
ASTKGPSVFPLAPCSRSTSESTAALGCLVKDYFPEPVTVSWNSGALTSGVHTFPAVLQSSGLYSLSSVVTVPSSNFGTQTYTCNVDHKPSNTKVDKTVERKSCVECPPCPAPPVAGDSVFLFPPKPKDTLMISRTPEVTCVVVDVSHEDGEVQFNWYVDGVEVHNAKTKPREEQFNSTFRVVSVLTVVHQDWLNGKEYKCKVSNKGLPAPIEKTISKTKGQPREPQVYTLPPSREEMTKNQVSLTCLVKGFYPSDIAVEWESNGQPENNYKTTPPMLDSDGSFFLYSKLTVDKSRWQQGNVFSCSVMHEALHNHYTQKSLSLSPGK

SEQ ID NO: 334 - protein, 326 aa, Artificial Sequence
  Synthetic: IgG2.3-V15
ASTKGPSVFPLAPCSRSTSESTAALGCLVKDYFPEPVTVSWNSGALTSGVHTFPAVLQSSGLYSLSSVVTVPSSNFGTQTYTCNVDHKPSNTKVDKTVERKSCVECPPCPAPPVAGDSVFLFPPKPKDTLMISRTPEVTCVVVDVSDEDGEVQFNWYVDGVEVHNAKTKPREEQFNSTFRVVSVLTVVHQDWLNGKEYKCKVSNKGLPAPIEKTISKTKGQPREPQVYTLPPSREEMTKNQVSLTCLVKGFYPSDIAVEWESNGQPENNYKTTPPMLDSDGSFFLYSKLTVDKSRWQQGNVFSCSVMHEALHNHYTQKSLSLSPGK

SEQ ID NO: 335 - protein, 326 aa, Artificial Sequence
  Synthetic: IgG2.3-V16
ASTKGPSVFPLAPCSRSTSESTAALGCLVKDYFPEPVTVSWNSGALTSGVHTFPAVLQSSGLYSLSSVVTVPSSNFGTQTYTCNVDHKPSNTKVDKTVERKSCVECPPCPAPPVAGDSVFLFPPKPKDTLMISRTPEVTCVVVDVSHEDGEVQFNWYVDGVEVHNAKTKPREEQFNSTFRVVSVLTVVHQDWLNGKEYKCKVSNKGLPRPIEKTISKTKGQPREPQVYTLPPSREEMTKNQVSLTCLVKGFYPSDIAVEWESNGQPENNYKTTPPMLDSDGSFFLYSKLTVDKSRWQQGNVFSCSVMHEALHNHYTQKSLSLSPGK

SEQ ID NO: 336 - protein, 326 aa, Artificial Sequence
  Synthetic: IgG2.3-V17
ASTKGPSVFPLAPCSRSTSESTAALGCLVKDYFPEPVTVSWNSGALTSGVHTFPAVLQSSGLYSLSSVVTVPSSNFGTQTYTCNVDHKPSNTKVDKTVERKSCVECPPCPAPPVAGDSVFLFPPKPKDTLMISRTPEVTCVVVDVSDEDGEVQFNWYVDGVEVHNAKTKPREEQFNSTFRVVSVLTVVHQDWLNGKEYKCKVSNKGLPRPIEKTISKTKGQPREPQVYTLPPSREEMTKNQVSLTCLVKGFYPSDIAVEWESNGQPENNYKTTPPMLDSDGSFFLYSKLTVDKSRWQQGNVFSCSVMHEALHNHYTQKSLSLSPGK

SEQ ID NO: 337 - protein, 326 aa, Artificial Sequence
  Synthetic: IgG2.3-V18
ASTKGPSVFPLAPCSRSTSESTAALGCLVKDYFPEPVTVSWNSGALTSGVHTFPAVLQSSGLYSLSSVVTVPSSNFGTQTYTCNVDHKPSNTKVDKTVERKSCVECPPCPAPPVAGPSVFLFPPKPKDTLMISRTPEVTCVVVDVEHEDPEVQFNWYVDGVEVHNAKTKPREEQFNSTFRVVSVLTVVHQDWLNGKEYKCKVSNKGLPAPIEKTISKTKGQPREPQVYTLPPSREEMTKNQVSLTCLVKGFYPSDIAVEWESNGQPENNYKTTPPMLDSDGSFFLYSKLTVDKSRWQQGNVFSCSVMHEALHNHYTQKSLSLSPGK

SEQ ID NO: 338 - protein, 326 aa, Artificial Sequence
  Synthetic: IgG2.3-V19
ASTKGPSVFPLAPCSRSTSESTAALGCLVKDYFPEPVTVSWNSGALTSGVHTFPAVLQSSGLYSLSSVVTVPSSNFGTQTYTCNVDHKPSNTKVDKTVERKSCVECPPCPAPPVAGPSVFLFPPKPKDTLMISRTPEVTCVVVDVEHEDPEVQFNWYVDGVEVHNAKTKPREEQFNSTFRVVSVLTVVHQDWLNGKEYKCKVSNKGFPAPIEKTISKTKGQPREPQVYTLPPSREEMTKNQVSLTCLVKGFYPSDIAVEWESNGQPENNYKTTPPMLDSDGSFFLYSKLTVDKSRWQQGNVFSCSVMHEALHNHYTQKSLSLSPGK

SEQ ID NO: 339 - protein, 327 aa, Artificial Sequence
  Synthetic: IgG2.3G1-AY-V20
ASTKGPSVFPLAPCSRSTSESTAALGCLVKDYFPEPVTVSWNSGALTSGVHTFPAVLQSSGLYSLSSVVTVPSSNFGTQTYTCNVDHKPSNTKVDKTVERKSCVECPPCPAPELLGGDSVFLFPPKPKDTLMISRTPEVTCVVVDVSHEDPEVKFNWYVDGVEVHNAKTKPREEQYNSTYRVVSVLTVLHQDWLNGKEYKCKVSNKALPAPIEKTISKAKGQPREPQVYTLPPSREEMTKNQVSLTCLVKGFYPSDIAVEWESNGQPENNYKTTPPVLDSDGSFFLYSKLTVDKSRWQQGNVFSCSVMHEALHNHYTQKSLSLSPGK

SEQ ID NO: 340 - protein, 327 aa, Artificial Sequence
  Synthetic: IgG2.3G1-AY-V21
ASTKGPSVFPLAPCSRSTSESTAALGCLVKDYFPEPVTVSWNSGALTSGVHTFPAVLQSSGLYSLSSVVTVPSSNFGTQTYTCNVDHKPSNTKVDKTVERKSCVECPPCPAPELLGGDSVFLFPPKPKDTLMISRTPEVTCVVVDVSHEDGEVKFNWYVDGVEVHNAKTKPREEQYNSTYRVVSVLTVLHQDWLNGKEYKCKVSNKALPAPIEKTISKAKGQPREPQVYTLPPSREEMTKNQVSLTCLVKGFYPSDIAVEWESNGQPENNYKTTPPVLDSDGSFFLYSKLTVDKSRWQQGNVFSCSVMHEALHNHYTQKSLSLSPGK

SEQ ID NO: 341 - protein, 327 aa, Artificial Sequence
  Synthetic: IgG2.3G1-AY-V22
ASTKGPSVFPLAPCSRSTSESTAALGCLVKDYFPEPVTVSWNSGALTSGVHTFPAVLQSSGLYSLSSVVTVPSSNFGTQTYTCNVDHKPSNTKVDKTVERKSCVECPPCPAPELLGGDSVFLFPPKPKDTLMISRTPEVTCVVVDVSDEDGEVKFNWYVDGVEVHNAKTKPREEQYNSTYRVVSVLTVLHQDWLNGKEYKCKVSNKALPAPIEKTISKAKGQPREPQVYTLPPSREEMTKNQVSLTCLVKGFYPSDIAVEWESNGQPENNYKTTPPVLDSDGSFFLYSKLTVDKSRWQQGNVFSCSVMHEALHNHYTQKSLSLSPGK

SEQ ID NO: 342 - protein, 327 aa, Artificial Sequence
  Synthetic: IgG2.3G1-AY-V23
ASTKGPSVFPLAPCSRSTSESTAALGCLVKDYFPEPVTVSWNSGALTSGVHTFPAVLQSSGLYSLSSVVTVPSSNFGTQTYTCNVDHKPSNTKVDKTVERKSCVECPPCPAPELLGGDSVFLFPPKPKDTLMISRTPEVTCVVVDVSHEDGEVKFNWYVDGVEVHNAKTKPREEQYNSTYRVVSVLTVLHQDWLNGKEYKCKVSNKALPRPIEKTISKAKGQPREPQVYTLPPSREEMTKNQVSLTCLVKGFYPSDIAVEWESNGQPENNYKTTPPVLDSDGSFFLYSKLTVDKSRWQQGNVFSCSVMHEALHNHYTQKSLSLSPGK

SEQ ID NO: 343 - protein, 327 aa, Artificial Sequence
  Synthetic: IgG2.3G1-AY-V24
ASTKGPSVFPLAPCSRSTSESTAALGCLVKDYFPEPVTVSWNSGALTSGVHTFPAVLQSSGLYSLSSVVTVPSSNFGTQTYTCNVDHKPSNTKVDKTVERKSCVECPPCPAPELLGGDSVFLFPPKPKDTLMISRTPEVTCVVVDVSDEDGEVKFNWYVDGVEVHNAKTKPREEQYNSTYRVVSVLTVLHQDWLNGKEYKCKVSNKALPRPIEKTISKAKGQPREPQVYTLPPSREEMTKNQVSLTCLVKGFYPSDIAVEWESNGQPENNYKTTPPVLDSDGSFFLYSKLTVDKSRWQQGNVFSCSVMHEALHNHYTQKSLSLSPGK

SEQ ID NO: 344 - protein, 327 aa, Artificial Sequence
  Synthetic: IgG2.3G1-AY-V25
ASTKGPSVFPLAPCSRSTSESTAALGCLVKDYFPEPVTVSWNSGALTSGVHTFPAVLQSSGLYSLSSVVTVPSSNFGTQTYTCNVDHKPSNTKVDKTVERKSCVECPPCPAPELLGDDSVFLFPPKPKDTLMISRTPEVTCVVVDVSDEDGEVKFNWYVDGVEVHNAKTKPREEQYNSTYRVVSVLTVLHQDWLNGKEYKCKVSNKALPRPIEKTISKAKGQPREPQVYTLPPSREEMTKNQVSLTCLVKGFYPSDIAVEWESNGQPENNYKTTPPVLDSDGSFFLYSKLTVDKSRWQQGNVFSCSVMHEALHNHYTQKSLSLSPGK

SEQ ID NO: 345 - protein, 327 aa, Artificial Sequence
  Synthetic: IgG2.3G1-AY-V26
ASTKGPSVFPLAPCSRSTSESTAALGCLVKDYFPEPVTVSWNSGALTSGVHTFPAVLQSSGLYSLSSVVTVPSSNFGTQTYTCNVDHKPSNTKVDKTVERKSCVECPPCPAPDLLGDDSVFLFPPKPKDTLMISRTPEVTCVVVDVSDEDGEVKFNWYVDGVEVHNAKTKPREEQYNSTYRVVSVLTVLHQDWLNGKEYKCKVSNKALPRPIEKTISKAKGQPREPQVYTLPPSREEMTKNQVSLTCLVKGFYPSDIAVEWESNGQPENNYKTTPPVLDSDGSFFLYSKLTVDKSRWQQGNVFSCSVMHEALHNHYTQKSLSLSPGK

SEQ ID NO: 346 - protein, 327 aa, Artificial Sequence
  Synthetic: IgG2.3G1-AY-V27
ASTKGPSVFPLAPCSRSTSESTAALGCLVKDYFPEPVTVSWNSGALTSGVHTFPAVLQSSGLYSLSSVVTVPSSNFGTQTYTCNVDHKPSNTKVDKTVERKSCVECPPCPAPELLGGPSVFLFPPKPKDTLMISRTPEVTCVVVDVEHEDPEVKFNWYVDGVEVHNAKTKPREEQYNSTYRVVSVLTVLHQDWLNGKEYKCKVSNKALPAPIEKTISKAKGQPREPQVYTLPPSREEMTKNQVSLTCLVKGFYPSDIAVEWESNGQPENNYKTTPPVLDSDGSFFLYSKLTVDKSRWQQGNVFSCSVMHEALHNHYTQKSLSLSPGK

SEQ ID NO: 347 - protein, 327 aa, Artificial Sequence
  Synthetic: IgG2.3G1-AY-V28
ASTKGPSVFPLAPCSRSTSESTAALGCLVKDYFPEPVTVSWNSGALTSGVHTFPAVLQSSGLYSLSSVVTVPSSNFGTQTYTCNVDHKPSNTKVDKTVERKSCVECPPCPAPELLGGPSVFLFPPKPKDTLMISRTPEVTCVVVDVEHEDPEVKFNWYVDGVEVHNAKTKPREEQYNSTYRVVSVLTVLHQDWLNGKEYKCKVSNKAFPAPIEKTISKAKGQPREPQVYTLPPSREEMTKNQVSLTCLVKGFYPSDIAVEWESNGQPENNYKTTPPVLDSDGSFFLYSKLTVDKSRWQQGNVFSCSVMHEALHNHYTQKSLSLSPGK

SEQ ID NO: 348 - protein, 18 aa, Artificial Sequence
  Synthetic: Alternative hinge
ERKCCVECPPCPAPPVAG

SEQ ID NO: 349 - protein, 18 aa, Artificial Sequence
  Synthetic: Alternative hinge
ERKSCVECPPCPAPPVAG

SEQ ID NO: 350 - protein, 18 aa, Artificial Sequence
  Synthetic: Alternative hinge
ERKCSVECPPCPAPPVAG

SEQ ID NO: 351 - protein, 18 aa, Artificial Sequence
  Synthetic: Alternative hinge
  misc_feature (4)..(4): Xaa can be any naturally occurring amino acid, except a cysteine
ERKXCVECPPCPAPPVAG

SEQ ID NO: 352 - protein, 18 aa, Artificial Sequence
  Synthetic: Alternative hinge
  misc_feature (5)..(5): Xaa can be any naturally occurring amino acid, except a cysteine
ERKCXVECPPCPAPPVAG

SEQ ID NO: 353 - protein, 19 aa, Artificial Sequence
  Synthetic: Alternative hinge
  misc_feature (19)..(19): Xaa can be any naturally occurring amino acid, except a cysteine
ERKCCVECPPCPAPPVAGX

SEQ ID NO: 354 - protein, 19 aa, Artificial Sequence
  Synthetic: Alternative hinge
  misc_feature (19)..(19): Xaa can be any naturally occurring amino acid, except a cysteine
ERKSCVECPPCPAPPVAGX

SEQ ID NO: 355 - protein, 19 aa, Artificial Sequence
  Synthetic: Alternative hinge
  misc_feature (19)..(19): Xaa can be any naturally occurring amino acid, except a cysteine
ERKCSVECPPCPAPPVAGX

SEQ ID NO: 356 - protein, 19 aa, Artificial Sequence
  Synthetic: Alternative hinge
  misc_feature (4)..(4): Xaa can be any naturally occurring amino acid, except a cysteine
  misc_feature (19)..(19): Xaa can be any naturally occurring amino acid, except a cysteine
ERKXCVECPPCPAPPVAGX

SEQ ID NO: 357 - protein, 19 aa, Artificial Sequence
  Synthetic: Alternative hinge
  misc_feature (5)..(5): Xaa can be any naturally occurring amino acid, except a cysteine
  misc_feature (19)..(19): Xaa can be any naturally occurring amino acid, except a cysteine
ERKCXVECPPCPAPPVAGX

SEQ ID NO: 358 - protein, 19 aa, Artificial Sequence
  Synthetic: Alternative hinge
ERKCCVECPPCPAPELLGG

SEQ ID NO: 359 - protein, 19 aa, Artificial Sequence
  Synthetic: Alternative hinge
ERKSCVECPPCPAPELLGG

SEQ ID NO: 360 - protein, 20 aa, Artificial Sequence
  Synthetic: Alternative hinge
ERKCCSVECPPCPAPELLGG

SEQ ID NO: 361 - protein, 19 aa, Artificial Sequence
  Synthetic: Alternative hinge
  misc_feature (4)..(4): Xaa can be any naturally occurring amino acid, except a cysteine
ERKXCVECPPCPAPELLGG

SEQ ID NO: 362 - protein, 19 aa, Artificial Sequence
  Synthetic: Alternative hinge
  misc_feature (5)..(5): Xaa can be any naturally occurring amino acid, except a cysteine
ERKCXVECPPCPAPELLGG

SEQ ID NO: 363 - protein, 18 aa, Artificial Sequence
  Synthetic: Alternative hinge
ERKCCVECPPCPAPELLG

SEQ ID NO: 364 - protein, 18 aa, Artificial Sequence
  Synthetic: Alternative hinge
ERKSCVECPPCPAPELLG

SEQ ID NO: 365 - protein, 19 aa, Artificial Sequence
  Synthetic: Alternative hinge
ERKCCSVECPPCPAPELLG

SEQ ID NO: 366 - protein, 18 aa, Artificial Sequence
  Synthetic: Alternative hinge
  misc_feature (4)..(4): Xaa can be any naturally occurring amino acid, except a cysteine
ERKXCVECPPCPAPELLG

SEQ ID NO: 367 - protein, 18 aa, Artificial Sequence
  Synthetic: Alternative hinge
  misc_feature (5)..(5): Xaa can be any naturally occurring amino acid, except a cysteine
ERKCXVECPPCPAPELLG

SEQ ID NO: 368 - protein, 14 aa, Artificial Sequence
  Synthetic: Alternative hinge
ERKCCVECPPCPAP

SEQ ID NO: 369 - protein, 14 aa, Artificial Sequence
  Synthetic: Alternative hinge
ERKSCVECPPCPAP

SEQ ID NO: 370 - protein, 14 aa, Artificial Sequence
  Synthetic: Alternative hinge
ERKCSVECPPCPAP

SEQ ID NO: 371 - protein, 14 aa, Artificial Sequence
  Synthetic: Alternative hinge
  misc_feature (4)..(4): Xaa can be any naturally occurring amino acid, except a cysteine
ERKXCVECPPCPAP

SEQ ID NO: 372 - protein, 14 aa, Artificial Sequence
  Synthetic: Alternative hinge
  misc_feature (5)..(5): Xaa can be any naturally occurring amino acid, except a cysteine
ERKCXVECPPCPAP

SEQ ID NO: 373 - protein, 4 aa, Artificial Sequence
  Synthetic: Portion of hinge
PVAG

SEQ ID NO: 374 - protein, 4 aa, Artificial Sequence
  Synthetic: Portion of hinge
ELLG

SEQ ID NO: 375 - protein, 5 aa, Artificial Sequence
  Synthetic: Portion of hinge
ELLGG

SEQ ID NO: 376 - protein, 7 aa, Artificial Sequence
  Synthetic: Portion of hinge
SCDKTHT

SEQ ID NO: 377 - protein, 4 aa, Artificial Sequence
  Synthetic: Portion of hinge
CCVE

SEQ ID NO: 378 - protein, 98 aa, Artificial Sequence; identical to SEQ ID NO: 124
  Synthetic: wt IgG2 CH1 domain

SEQ ID NO: 379 - protein, 116 aa, Artificial Sequence
  Synthetic: IgG2 CH1 and hinge
ASTKGPSVFPLAPCSRSTSESTAALGCLVKDYFPEPVTVSWNSGALTSGVHTFPAVLQSSGLYSLSSVVTVPSSNFGTQTYTCNVDHKPSNTKVDKTVERKCCVECPPCPAPPVAG

SEQ ID NO: 380 - protein, 7 aa, Artificial Sequence
  Synthetic: Portion of hinge
CPPCPAP

SEQ ID NO: 381 - protein, 113 aa, Artificial Sequence [sequence omitted]

SEQ ID NO: 382 - protein, 107 aa, Artificial Sequence [sequence omitted]

SEQ ID NO: 383 - protein, 5 aa, Artificial Sequence
  Synthetic: Heavy chain CDR1 of nivolumab
NSGMH

SEQ ID NO: 384 - protein, 17 aa, Artificial Sequence
  Synthetic: Heavy chain CDR2 of nivolumab
VIWYDGSKRYYADSVKG

SEQ ID NO: 385 - protein, 4 aa, Artificial Sequence
  Synthetic: Heavy chain CDR3 of nivolumab
NDDY

SEQ ID NO: 386 - protein, 11 aa, Artificial Sequence
  Synthetic: Light chain CDR1 of nivolumab
RASQSVSSYLA

SEQ ID NO: 387 - protein, 7 aa, Artificial Sequence
  Synthetic: Light chain CDR2 of nivolumab
DASNRAT

SEQ ID NO: 388 - protein, 9 aa, Artificial Sequence
  Synthetic: Light chain CDR2 of nivolumab
QQSSNWPRT

SEQ ID NO: 389 - DNA, 339 bp, Artificial Sequence
  Synthetic: Heavy chain variable region of nivolumab (nucleic acid sequence)
caggtgcagctggtggagtctgggggaggcgtggtccagcctgggaggtccctgagactcgactgtaaagcgtctggaatcaccttcagtaactctggcatgcactgggtccgccaggctccaggcaaggggctggagtgggtggcagttatttggtatgatggaagtaaaagatactatgcagactccgtgaagggccgattcaccatctccagagacaattccaagaacacgctgtttctgcaaatgaacagcctgagagccgaggacacggctgtgtattactgtgcgacaaacgacgactactggggccagggaaccctggtcaccgtctcctca

SEQ ID NO: 390 - DNA, 321 bp, Artificial Sequence
  Synthetic: Light chain variable region of nivolumab (nucleic acid sequence)
gaaattgtgttgacacagtctccagccaccctgtctttgtctccaggggaaagagccaccctctcctgcagggccagtcagagtgttagtagttacttagcctggtaccaacagaaacctggccaggctcccaggctcctcatctatgatgcatccaacagggccactggcatcccagccaggttcagtggcagtgggtctgggacagacttcactctcaccatcagcagcctagagcctgaagattttgcagtttattactgtcagcagagtagcaactggcctcggacgttcggccaagggaccaaggtggaaatcaaa

SEQ ID NO: 391 - protein, 327 aa, Artificial Sequence
  Synthetic: IgG2.3G1-AY-V9-D270E
ASTKGPSVFPLAPCSRSTSESTAALGCLVKDYFPEPVTVSWNSGALTSGVHTFPAVLQSSGLYSLSSVVTVPSSNFGTQTYTCNVDHKPSNTKVDKTVERKSCVECPPCPAPELLGDDSVFLFPPKPKDTLMISRTPEVTCVVVDVSHEEGEVKFNWYVDGVEVHNAKTKPREEQYNSTYRVVSVLTVLHQDWLNGKEYKCKVSNKALPRPIEKTISKAKGQPREPQVYTLPPSREEMTKNQVSLTCLVKGFYPSDIAVEWESNGQPENNYKTTPPVLDSDGSFFLYSKLTVDKSRWQQGNVFSCSVMHEALHNHYTQKSLSLSPGK

SEQ ID NO: 392 - protein, 327 aa, Artificial Sequence; identical to SEQ ID NO: 344
  Synthetic: IgG2.3G1-AY-V11

SEQ ID NO: 393 - protein, 327 aa, Artificial Sequence
  Synthetic: IgG2.5G1-AY-V9-D270E
ASTKGPSVFPLAPSSRSTSESTAALGCLVKDYFPEPVTVSWNSGALTSGVHTFPAVLQSSGLYSLSSVVTVPSSNFGTQTYTCNVDHKPSNTKVDKTVERKCCVECPPCPAPELLGDDSVFLFPPKPKDTLMISRTPEVTCVVVDVSHEEGEVKFNWYVDGVEVHNAKTKPREEQYNSTYRVVSVLTVLHQDWLNGKEYKCKVSNKALPRPIEKTISKAKGQPREPQVYTLPPSREEMTKNQVSLTCLVKGFYPSDIAVEWESNGQPENNYKTTPPVLDSDGSFFLYSKLTVDKSRWQQGNVFSCSVMHEALHNHYTQKSLSLSPGK

SEQ ID NO: 394 - protein, 327 aa, Artificial Sequence
  Synthetic: IgG2.5G1-AY-V11
ASTKGPSVFPLAPSSRSTSESTAALGCLVKDYFPEPVTVSWNSGALTSGVHTFPAVLQSSGLYSLSSVVTVPSSNFGTQTYTCNVDHKPSNTKVDKTVERKCCVECPPCPAPELLGDDSVFLFPPKPKDTLMISRTPEVTCVVVDVSDEDGEVKFNWYVDGVEVHNAKTKPREEQYNSTYRVVSVLTVLHQDWLNGKEYKCKVSNKALPRPIEKTISKAKGQPREPQVYTLPPSREEMTKNQVSLTCLVKGFYPSDIAVEWESNGQPENNYKTTPPVLDSDGSFFLYSKLTVDKSRWQQGNVFSCSVMHEALHNHYTQKSLSLSPGK

SEQ ID NO: 395 - protein, 330 aa, Artificial Sequence
  Synthetic: IgG1f-GASDALIE
ASTKGPSVFPLAPSSKSTSGGTAALGCLVKDYFPEPVTVSWNSGALTSGVHTFPAVLQSSGLYSLSSVVTVPSSSLGTQTYICNVNHKPSNTKVDKRVEPKSCDKTHTCPPCPAPELLAGPDVFLFPPKPKDTLMISRTPEVTCVVVDVSHEDPEVKFNWYVDGVEVHNAKTKPREEQYNSTYRVVSVLTVLHQDWLNGKEYKCKVSNKALPLPEEKTISKAKGQPREPQVYTLPPSREEMTKNQVSLTCLVKGFYPSDIAVEWESNGQPENNYKTTPPVLDSDGSFFLYSKLTVDKSRWQQGNVFSCSVMHEALHNHYTQKSLSLSPGK

SEQ ID NO: 396 - protein, 330 aa, Artificial Sequence
  Synthetic: IgG1f-G236A
ASTKGPSVFPLAPSSKSTSGGTAALGCLVKDYFPEPVTVSWNSGALTSGVHTFPAVLQSSGLYSLSSVVTVPSSSLGTQTYICNVNHKPSNTKVDKRVEPKSCDKTHTCPPCPAPELLAGPSVFLFPPKPKDTLMISRTPEVTCVVVDVSHEDPEVKFNWYVDGVEVHNAKTKPREEQYNSTYRVVSVLTVLHQDWLNGKEYKCKVSNKALPAPIEKTISKAKGQPREPQVYTLPPSREEMTKNQVSLTCLVKGFYPSDIAVEWESNGQPENNYKTTPPVLDSDGSFFLYSKLTVDKSRWQQGNVFSCSVMHEALHNHYTQKSLSLSPGK

SEQ ID NO: 397 - protein, 327 aa, Artificial Sequence
  Synthetic: IgG2.3G1-AY-G236A
ASTKGPSVFPLAPCSRSTSESTAALGCLVKDYFPEPVTVSWNSGALTSGVHTFPAVLQSSGLYSLSSVVTVPSSNFGTQTYTCNVDHKPSNTKVDKTVERKSCVECPPCPAPELLAGPSVFLFPPKPKDTLMISRTPEVTCVVVDVSHEDPEVKFNWYVDGVEVHNAKTKPREEQYNSTYRVVSVLTVLHQDWLNGKEYKCKVSNKALPAPIEKTISKAKGQPREPQVYTLPPSREEMTKNQVSLTCLVKGFYPSDIAVEWESNGQPENNYKTTPPVLDSDGSFFLYSKLTVDKSRWQQGNVFSCSVMHEALHNHYTQKSLSLSPGK

SEQ ID NO: 398 - protein, 327 aa, Artificial Sequence
  Synthetic: IgG2.3G1-AY-GASDALIE
ASTKGPSVFPLAPCSRSTSESTAALGCLVKDYFPEPVTVSWNSGALTSGVHTFPAVLQSSGLYSLSSVVTVPSSNFGTQTYTCNVDHKPSNTKVDKTVERKSCVECPPCPAPELLAGPDVFLFPPKPKDTLMISRTPEVTCVVVDVSHEDPEVKFNWYVDGVEVHNAKTKPREEQYNSTYRVVSVLTVLHQDWLNGKEYKCKVSNKALPLPEEKTISKAKGQPREPQVYTLPPSREEMTKNQVSLTCLVKGFYPSDIAVEWESNGQPENNYKTTPPVLDSDGSFFLYSKLTVDKSRWQQGNVFSCSVMHEALHNHYTQKSLSLSPGK

SEQ ID NO: 399 - protein, 327 aa, Artificial Sequence
  Synthetic: IgG2.5G1-AY-G236A
ASTKGPSVFPLAPSSRSTSESTAALGCLVKDYFPEPVTVSWNSGALTSGVHTFPAVLQSSGLYSLSSVVTVPSSNFGTQTYTCNVDHKPSNTKVDKTVERKCCVECPPCPAPELLAGPSVFLFPPKPKDTLMISRTPEVTCVVVDVSHEDPEVKFNWYVDGVEVHNAKTKPREEQYNSTYRVVSVLTVLHQDWLNGKEYKCKVSNKALPAPIEKTISKAKGQPREPQVYTLPPSREEMTKNQVSLTCLVKGFYPSDIAVEWESNGQPENNYKTTPPVLDSDGSFFLYSKLTVDKSRWQQGNVFSCSVMHEALHNHYTQKSLSLSPGK

SEQ ID NO: 400 - protein, 326 aa, Artificial Sequence
  Synthetic: IgG2.5G1-AY-GASDALIE
STKGPSVFPLAPSSRSTSESTAALGCLVKDYFPEPVTVSWNSGALTSGVHTFPAVLQSSGLYSLSSVVTVPSSNFGTQTYTCNVDHKPSNTKVDKTVERKCCVECPPCPAPELLAGPDVFLFPPKPKDTLMISRTPEVTCVVVDVSHEDPEVKFNWYVDGVEVHNAKTKPREEQYNSTYRVVSVLTVLHQDWLNGKEYKCKVSNKALPLPEEKTISKAKGQPREPQVYTLPPSREEMTKNQVSLTCLVKGFYPSDIAVEWESNGQPENNYKTTPPVLDSDGSFFLYSKLTVDKSRWQQGNVFSCSVMHEALHNHYTQKSLSLSPGK

SEQ ID NO: 401 - protein, 327 aa, Artificial Sequence
  Synthetic: IgG2.3G1.1f-AY
ASTKGPSVFPLAPCSRSTSESTAALGCLVKDYFPEPVTVSWNSGALTSGVHTFPAVLQSSGLYSLSSVVTVPSSNFGTQTYTCNVDHKPSNTKVDKTVERKSCVECPPCPAPEAEGAPSVFLFPPKPKDTLMISRTPEVTCVVVDVSHEDPEVKFNWYVDGVEVHNAKTKPREEQYNSTYRVVSVLTVLHQDWLNGKEYKCKVSNKALPSSIEKTISKAKGQPREPQVYTLPPSREEMTKNQVSLTCLVKGFYPSDIAVEWESNGQPENNYKTTPPVLDSDGSFFLYSKLTVDKSRWQQGNVFSCSVMHEALHNHYTQKSLSLSPGK

SEQ ID NO: 402 - protein, 327 aa, Artificial Sequence
  Synthetic: IgG2.3G1.3f-AY
ASTKGPSVFPLAPCSRSTSESTAALGCLVKDYFPEPVTVSWNSGALTSGVHTFPAVLQSSGLYSLSSVVTVPSSNFGTQTYTCNVDHKPSNTKVDKTVERKSCVECPPCPAPEAEGAPSVFLFPPKPKDTLMISRTPEVTCVVVDVSHEDPEVKFNWYVDGVEVHNAKTKPREEQYNSTYRVVSVLTVLHQDWLNGKEYKCKVSNKALPAPIEKTISKAKGQPREPQVYTLPPSREEMTKNQVSLTCLVKGFYPSDIAVEWESNGQPENNYKTTPPVLDSDGSFFLYSKLTVDKSRWQQGNVFSCSVMHEALHNHYTQKSLSLSPGK

SEQ ID NO: 403 - protein, 327 aa, Artificial Sequence
  Synthetic: IgG2.3G1-AY-D265A
ASTKGPSVFPLAPCSRSTSESTAALGCLVKDYFPEPVTVSWNSGALTSGVHTFPAVLQSSGLYSLSSVVTVPSSNFGTQTYTCNVDHKPSNTKVDKTVERKSCVECPPCPAPELLGGPSVFLFPPKPKDTLMISRTPEVTCVVVAVSHEDPEVKFNWYVDGVEVHNAKTKPREEQYNSTYRVVSVLTVLHQDWLNGKEYKCKVSNKALPAPIEKTISKAKGQPREPQVYTLPPSREEMTKNQVSLTCLVKGFYPSDIAVEWESNGQPENNYKTTPPVLDSDGSFFLYSKLTVDKSRWQQGNVFSCSVMHEALHNHYTQKSLSLSPGK

SEQ ID NO: 404 - protein, 327 aa, Artificial Sequence
  Synthetic: IgG2.3G1-AY-N297A
ASTKGPSVFPLAPCSRSTSESTAALGCLVKDYFPEPVTVSWNSGALTSGVHTFPAVLQSSGLYSLSSVVTVPSSNFGTQTYTCNVDHKPSNTKVDKTVERKSCVECPPCPAPELLGGPSVFLFPPKPKDTLMISRTPEVTCVVVDVSHEDPEVKFNWYVDGVEVHNAKTKPREEQYASTYRVVSVLTVLHQDWLNGKEYKCKVSNKALPAPIEKTISKAKGQPREPQVYTLPPSREEMTKNQVSLTCLVKGFYPSDIAVEWESNGQPENNYKTTPPVLDSDGSFFLYSKLTVDKSRWQQGNVFSCSVMHEALHNHYTQKSLSLSPGK

SEQ ID NO: 405 - protein, 327 aa, Artificial Sequence
  Synthetic: IgG2.5G1.1f-AY
ASTKGPSVFPLAPSSRSTSESTAALGCLVKDYFPEPVTVSWNSGALTSGVHTFPAVLQSSGLYSLSSVVTVPSSNFGTQTYTCNVDHKPSNTKVDKTVERKCCVECPPCPAPEAEGAPSVFLFPPKPKDTLMISRTPEVTCVVVDVSHEDPEVKFNWYVDGVEVHNAKTKPREEQYNSTYRVVSVLTVLHQDWLNGKEYKCKVSNKALPSSIEKTISKAKGQPREPQVYTLPPSREEMTKNQVSLTCLVKGFYPSDIAVEWESNGQPENNYKTTPPVLDSDGSFFLYSKLTVDKSRWQQGNVFSCSVMHEALHNHYTQKSLSLSPGK

SEQ ID NO: 406 - protein, 327 aa, Artificial Sequence
  Synthetic: IgG2.5G1.3f-AY
ASTKGPSVFPLAPSSRSTSESTAALGCLVKDYFPEPVTVSWNSGALTSGVHTFPAVLQSSGLYSLSSVVTVPSSNFGTQTYTCNVDHKPSNTKVDKTVERKCCVECPPCPAPEAEGAPSVFLFPPKPKDTLMISRTPEVTCVVVDVSHEDPEVKFNWYVDGVEVHNAKTKPREEQYNSTYRVVSVLTVLHQDWLNGKEYKCKVSNKALPAPIEKTISKAKGQPREPQVYTLPPSREEMTKNQVSLTCLVKGFYPSDIAVEWESNGQPENNYKTTPPVLDSDGSFFLYSKLTVDKSRWQQGNVFSCSVMHEALHNHYTQKSLSLSPGK

SEQ ID NO: 407 - protein, 327 aa, Artificial Sequence
  Synthetic: IgG2.5G1-AY-D265A
ASTKGPSVFPLAPSSRSTSESTAALGCLVKDYFPEPVTVSWNSGALTSGVHTFPAVLQSSGLYSLSSVVTVPSSNFGTQTYTCNVDHKPSNTKVDKTVERKCCVECPPCPAPELLGGPSVFLFPPKPKDTLMISRTPEVTCVVVAVSHEDPEVKFNWYVDGVEVHNAKTKPREEQYNSTYRVVSVLTVLHQDWLNGKEYKCKVSNKALPAPIEKTISKAKGQPREPQVYTLPPSREEMTKNQVSLTCLVKGFYPSDIAVEWESNGQPENNYKTTPPVLDSDGSFFLYSKLTVDKSRWQQGNVFSCSVMHEALHNHYTQKSLSLSPGK

SEQ ID NO: 408 - protein, 327 aa, Artificial Sequence
  Synthetic: IgG2.5G1-AY-N297A
ASTKGPSVFPLAPSSRSTSESTAALGCLVKDYFPEPVTVSWNSGALTSGVHTFPAVLQSSGLYSLSSVVTVPSSNFGTQTYTCNVDHKPSNTKVDKTVERKCCVECPPCPAPELLGGPSVFLFPPKPKDTLMISRTPEVTCVVVDVSHEDPEVKFNWYVDGVEVHNAKTKPREEQYASTYRVVSVLTVLHQDWLNGKEYKCKVSNKALPAPIEKTISKAKGQPREPQVYTLPPSREEMTKNQVSLTCLVKGFYPSDIAVEWESNGQPENNYKTTPPVLDSDGSFFLYSKLTVDKSRWQQGNVFSCSVMHEALHNHYTQKSLSLSPGK

SEQ ID NO: 409 - protein, 330 aa, Artificial Sequence
  Synthetic: CT
ASTKGPSVFPLAPSSKSTSGGTAALGCLVKDYFPEPVTVSWNSGALTSGVHTFPAVLQSSGLYSLSSVVTVPSSSLGTQTYICNVNHKPSNTKVDKRVEPKSCDKTHTSPPSPAPELLGGSSVFLFPPKPKDTLMISRTPEVTCVVVDVSHEDPEVKFNWYVDGVEVHNAKTKPREEQYNSTYRVVSVLTVLHQDWLNGKEYKCKVSNKALPAPIEKTISKAKGQPREPQVYTLPPSRDELTKNQVSLTCLVKGFYPSDIAVEWESNGQPENNYKTTPPVLDSDGSFFLYSKLTVDKSRWQQGNVFSCSVMHEALHNHYTQKSLSLSPGK

SEQ ID NO: 410 - protein, 330 aa, Artificial Sequence
  Synthetic: CTf
ASTKGPSVFPLAPSSKSTSGGTAALGCLVKDYFPEPVTVSWNSGALTSGVHTFPAVLQSSGLYSLSSVVTVPSSSLGTQTYICNVNHKPSNTKVDKRVEPKSCDKTHTSPPSPAPELLGGSSVFLFPPKPKDTLMISRTPEVTCVVVDVSHEDPEVKFNWYVDGVEVHNAKTKPREEQYNSTYRVVSVLTVLHQDWLNGKEYKCKVSNKALPAPIEKTISKAKGQPREPQVYTLPPSREEMTKNQVSLTCLVKGFYPSDIAVEWESNGQPENNYKTTPPVLDSDGSFFLYSKLTVDKSRWQQGNVFSCSVMHEALHNHYTQKSLSLSPGK

SEQ ID NO: 411 - protein, 327 aa, Artificial Sequence
  Synthetic: IgG2.3-CT
ASTKGPSVFPLAPCSRSTSESTAALGCLVKDYFPEPVTVSWNSGALTSGVHTFPAVLQSSGLYSLSSVVTVPSSNFGTQTYTCNVDHKPSNTKVDKTVERKSCVESPPSPAPELLGGSSVFLFPPKPKDTLMISRTPEVTCVVVDVSHEDPEVKFNWYVDGVEVHNAKTKPREEQYNSTYRVVSVLTVLHQDWLNGKEYKCKVSNKALPAPIEKTISKAKGQPREPQVYTLPPSRDELTKNQVSLTCLVKGFYPSDIAVEWESNGQPENNYKTTPPVLDSDGSFFLYSKLTVDKSRWQQGNVFSCSVMHEALHNHYTQKSLSLSPGK

SEQ ID NO: 412 - protein, 327 aa, Artificial Sequence
  Synthetic: IgG2.5-CT
ASTKGPSVFPLAPSSRSTSESTAALGCLVKDYFPEPVTVSWNSGALTSGVHTFPAVLQSSGLYSLSSVVTVPSSNFGTQTYTCNVDHKPSNTKVDKTVERKCCVESPPSPAPELLGGSSVFLFPPKPKDTLMISRTPEVTCVVVDVSHEDPEVKFNWYVDGVEVHNAKTKPREEQYNSTYRVVSVLTVLHQDWLNGKEYKCKVSNKALPAPIEKTISKAKGQPREPQVYTLPPSRDELTKNQVSLTCLVKGFYPSDIAVEWESNGQPENNYKTTPPVLDSDGSFFLYSKLTVDKSRWQQGNVFSCSVMHEALHNHYTQKSLSLSPGK

SEQ ID NO: 413 - protein, 330 aa, Artificial Sequence
  Synthetic: IgG1fa-C226S
ASTKGPSVFPLAPSSKSTSGGTAALGCLVKDYFPEPVTVSWNSGALTSGVHTFPAVLQSSGLYSLSSVVTVPSSSLGTQTYICNVNHKPSNTKVDKRVEPKSCDKTHTSPPCPAPELLGGPSVFLFPPKPKDTLMISRTPEVTCVVVDVSHEDPEVKFNWYVDGVEVHNAKTKPREEQYNSTYRVVSVLTVLHQDWLNGKEYKCKVSNKALPAPIEKTISKAKGQPREPQVYTLPPSRDELTKNQVSLTCLVKGFYPSDIAVEWESNGQPENNYKTTPPVLDSDGSFFLYSKLTVDKSRWQQGNVFSCSVMHEALHNHYTQKSLSLSPGK

SEQ ID NO: 414 - protein, 330 aa, Artificial Sequence
  Synthetic: IgG1fa-C229S
ASTKGPSVFPLAPSSKSTSGGTAALGCLVKDYFPEPVTVSWNSGALTSGVHTFPAVLQSSGLYSLSSVVTVPSSSLGTQTYICNVNHKPSNTKVDKRVEPKSCDKTHTCPPSPAPELLGGPSVFLFPPKPKDTLMISRTPEVTCVVVDVSHEDPEVKFNWYVDGVEVHNAKTKPREEQYNSTYRVVSVLTVLHQDWLNGKEYKCKVSNKALPAPIEKTISKAKGQPREPQVYTLPPSRDELTKNQVSLTCLVKGFYPSDIAVEWESNGQPENNYKTTPPVLDSDGSFFLYSKLTVDKSRWQQGNVFSCSVMHEALHNHYTQKSLSLSPGK

SEQ ID NO: 415 - protein, 330 aa, Artificial Sequence
  Synthetic: IgG1fa-C226S,C229S
ASTKGPSVFPLAPSSKSTSGGTAALGCLVKDYFPEPVTVSWNSGALTSGVHTFPAVLQSSGLYSLSSVVTVPSSSLGTQTYICNVNHKPSNTKVDKRVEPKSCDKTHTSPPSPAPELLGGPSVFLFPPKPKDTLMISRTPEVTCVVVDVSHEDPEVKFNWYVDGVEVHNAKTKPREEQYNSTYRVVSVLTVLHQDWLNGKEYKCKVSNKALPAPIEKTISKAKGQPREPQVYTLPPSRDELTKNQVSLTCLVKGFYPSDIAVEWESNGQPENNYKTTPPVLDSDGSFFLYSKLTVDKSRWQQGNVFSCSVMHEALHNHYTQKSLSLSPGK

SEQ ID NO: 416 - protein, 330 aa, Artificial Sequence
  Synthetic: IgG1fa-P238S
ASTKGPSVFPLAPSSKSTSGGTAALGCLVKDYFPEPVTVSWNSGALTSGVHTFPAVLQSSGLYSLSSVVTVPSSSLGTQTYICNVNHKPSNTKVDKRVEPKSCDKTHTCPPCPAPELLGGSSVFLFPPKPKDTLMISRTPEVTCVVVDVSHEDPEVKFNWYVDGVEVHNAKTKPREEQYNSTYRVVSVLTVLHQDWLNGKEYKCKVSNKALPAPIEKTISKAKGQPREPQVYTLPPSRDELTKNQVSLTCLVKGFYPSDIAVEWESNGQPENNYKTTPPVLDSDGSFFLYSKLTVDKSRWQQGNVFSCSVMHEALHNHYTQKSLSLSPGK

SEQ ID NO: 417 - protein, 330 aa, Artificial Sequence
  Synthetic: IgG1fa-C226A
ASTKGPSVFPLAPSSKSTSGGTAALGCLVKDYFPEPVTVSWNSGALTSGVHTFPAVLQSSGLYSLSSVVTVPSSSLGTQTYICNVNHKPSNTKVDKRVEPKSCDKTHTAPPCPAPELLGGPSVFLFPPKPKDTLMISRTPEVTCVVVDVSHEDPEVKFNWYVDGVEVHNAKTKPREEQYNSTYRVVSVLTVLHQDWLNGKEYKCKVSNKALPAPIEKTISKAKGQPREPQVYTLPPSRDELTKNQVSLTCLVKGFYPSDIAVEWESNGQPENNYKTTPPVLDSDGSFFLYSKLTVDKSRWQQGNVFSCSVMHEALHNHYTQKSLSLSPGK

SEQ ID NO: 418 - protein, 330 aa, Artificial Sequence
  Synthetic: IgG1fa-C229A
ASTKGPSVFPLAPSSKSTSGGTAALGCLVKDYFPEPVTVSWNSGALTSGVHTFPAVLQSSGLYSLSSVVTVPSSSLGTQTYICNVNHKPSNTKVDKRVEPKSCDKTHTCPPAPAPELLGGPSVFLFPPKPKDTLMISRTPEVTCVVVDVSHEDPEVKFNWYVDGVEVHNAKTKPREEQYNSTYRVVSVLTVLHQDWLNGKEYKCKVSNKALPAPIEKTISKAKGQPREPQVYTLPPSRDELTKNQVSLTCLVKGFYPSDIAVEWESNGQPENNYKTTPPVLDSDGSFFLYSKLTVDKSRWQQGNVFSCSVMHEALHNHYTQKSLSLSPGK

SEQ ID NO: 419 - protein, 330 aa, Artificial Sequence
  Synthetic: IgG1fa-C226A,C229A
ASTKGPSVFPLAPSSKSTSGGTAALGCLVKDYFPEPVTVSWNSGALTSGVHTFPAVLQSSGLYSLSSVVTVPSSSLGTQTYICNVNHKPSNTKVDKRVEPKSCDKTHTAPPAPAPELLGGPSVFLFPPKPKDTLMISRTPEVTCVVVDVSHEDPEVKFNWYVDGVEVHNAKTKPREEQYNSTYRVVSVLTVLHQDWLNGKEYKCKVSNKALPAPIEKTISKAKGQPREPQVYTLPPSRDELTKNQVSLTCLVKGFYPSDIAVEWESNGQPENNYKTTPPVLDSDGSFFLYSKLTVDKSRWQQGNVFSCSVMHEALHNHYTQKSLSLSPGK

SEQ ID NO: 420 - protein, 330 aa, Artificial Sequence
  Synthetic: IgG1fa-P238K
ASTKGPSVFPLAPSSKSTSGGTAALGCLVKDYFPEPVTVSWNSGALTSGVHTFPAVLQSSGLYSLSSVVTVPSSSLGTQTYICNVNHKPSNTKVDKRVEPKSCDKTHTCPPCPAPELLGGKSVFLFPPKPKDTLMISRTPEVTCVVVDVSHEDPEVKFNWYVDGVEVHNAKTKPREEQYNSTYRVVSVLTVLHQDWLNGKEYKCKVSNKALPAPIEKTISKAKGQPREPQVYTLPPSRDELTKNQVSLTCLVKGFYPSDIAVEWESNGQPENNYKTTPPVLDSDGSFFLYSKLTVDKSRWQQGNVFSCSVMHEALHNHYTQKSLSLSPGK

SEQ ID NO: 421 - protein, 326 aa, Artificial Sequence
  Synthetic: IgG2.3-R133K
ASTKGPSVFPLAPCSKSTSESTAALGCLVKDYFPEPVTVSWNSGALTSGVHTFPAVLQSSGLYSLSSVVTVPSSNFGTQTYTCNVDHKPSNTKVDKTVERKSCVECPPCPAPPVAGPSVFLFPPKPKDTLMISRTPEVTCVVVDVSHEDPEVQFNWYVDGVEVHNAKTKPREEQFNSTFRVVSVLTVVHQDWLNGKEYKCKVSNKGLPAPIEKTISKTKGQPREPQVYTLPPSREEMTKNQVSLTCLVKGFYPSDIAVEWESNGQPENNYKTTPPMLDSDGSFFLYSKLTVDKSRWQQGNVFSCSVMHEALHNHYTQKSLSLSPGK

SEQ ID NO: 422 - protein, 326 aa, Artificial Sequence
  Synthetic: IgG2.3-E137G
ASTKGPSVFPLAPCSRSTSGSTAALGCLVKDYFPEPVTVSWNSGALTSGVHTFPAVLQSSGLYSLSSVVTVPSSNFGTQTYTCNVDHKPSNTKVDKTVERKSCVECPPCPAPPVAGPSVFLFPPKPKDTLMISRTPEVTCVVVDVSHEDPEVQFNWYVDGVEVHNAKTKPREEQFNSTFRVVSVLTVVHQDWLNGKEYKCKVSNKGLPAPIEKTISKTKGQPREPQVYTLPPSREEMTKNQVSLTCLVKGFYPSDIAVEWESNGQPENNYKTTPPMLDSDGSFFLYSKLTVDKSRWQQGNVFSCSVMHEALHNHYTQKSLSLSPGK

SEQ ID NO: 423 - protein, 326 aa, Artificial Sequence
  Synthetic: IgG2.3-S138G
ASTKGPSVFPLAPCSRSTSEGTAALGCLVKDYFPEPVTVSWNSGALTSGVHTFPAVLQSSGLYSLSSVVTVPSSNFGTQTYTCNVDHKPSNTKVDKTVERKSCVECPPCPAPPVAGPSVFLFPPKPKDTLMISRTPEVTCVVVDVSHEDPEVQFNWYVDGVEVHNAKTKPREEQFNSTFRVVSVLTVVHQDWLNGKEYKCKVSNKGLPAPIEKTISKTKGQPREPQVYTLPPSREEMTKNQVSLTCLVKGFYPSDIAVEWESNGQPENNYKTTPPMLDSDGSFFLYSKLTVDKSRWQQGNVFSCSVMHEALHNHYTQKSLSLSPGK

SEQ ID NO: 424 - protein, 326 aa, Artificial Sequence
  Synthetic: IgG2.3-E137G-S138G
ASTKGPSVFPLAPCSRSTSGGTAALGCLVKDYFPEPVTVSWNSGALTSGVHTFPAVLQSSGLYSLSSVVTVPSSNFGTQTYTCNVDHKPSNTKVDKTVERKSCVECPPCPAPPVAGPSVFLFPPKPKDTLMISRTPEVTCVVVDVSHEDPEVQFNWYVDGVEVHNAKTKPREEQFNSTFRVVSVLTVVHQDWLNGKEYKCKVSNKGLPAPIEKTISKTKGQPREPQVYTLPPSREEMTKNQVSLTCLVKGFYPSDIAVEWESNGQPENNYKTTPPMLDSDGSFFLYSKLTVDKSRWQQGNVFSCSVMHEALHNHYTQKSLSLSPGK

SEQ ID NO: 425 - protein, 326 aa, Artificial Sequence
  Synthetic: IgG2.3-T214R
ASTKGPSVFPLAPCSRSTSESTAALGCLVKDYFPEPVTVSWNSGALTSGVHTFPAVLQSSGLYSLSSVVTVPSSNFGTQTYTCNVDHKPSNTKVDKRVERKSCVECPPCPAPPVAGPSVFLFPPKPKDTLMISRTPEVTCVVVDVSHEDPEVQFNWYVDGVEVHNAKTKPREEQFNSTFRVVSVLTVVHQDWLNGKEYKCKVSNKGLPAPIEKTISKTKGQPREPQVYTLPPSREEMTKNQVSLTCLVKGFYPSDIAVEWESNGQPENNYKTTPPMLDSDGSFFLYSKLTVDKSRWQQGNVFSCSVMHEALHNHYTQKSLSLSPGK

SEQ ID NO: 426 - protein, 326 aa, Artificial Sequence
  Synthetic: IgG2.3-R217P
ASTKGPSVFPLAPCSRSTSESTAALGCLVKDYFPEPVTVSWNSGALTSGVHTFPAVLQSSGLYSLSSVVTVPSSNFGTQTYTCNVDHKPSNTKVDKTVEPKSCVECPPCPAPPVAGPSVFLFPPKPKDTLMISRTPEVTCVVVDVSHEDPEVQFNWYVDGVEVHNAKTKPREEQFNSTFRVVSVLTVVHQDWLNGKEYKCKVSNKGLPAPIEKTISKTKGQPREPQVYTLPPSREEMTKNQVSLTCLVKGFYPSDIAVEWESNGQPENNYKTTPPMLDSDGSFFLYSKLTVDKSRWQQGNVFSCSVMHEALHNHYTQKSLSLSPGK

SEQ ID NO: 427 - protein, 326 aa, Artificial Sequence
  Synthetic: IgG2.3-R217S
ASTKGPSVFPLAPCSRSTSESTAALGCLVKDYFPEPVTVSWNSGALTSGVHTFPAVLQSSGLYSLSSVVTVPSSNFGTQTYTCNVDHKPSNTKVDKTVESKSCVECPPCPAPPVAGPSVFLFPPKPKDTLMISRTPEVTCVVVDVSHEDPEVQFNWYVDGVEVHNAKTKPREEQFNSTFRVVSVLTVVHQDWLNGKEYKCKVSNKGLPAPIEKTISKTKGQPREPQVYTLPPSREEMTKNQVSLTCLVKGFYPSDIAVEWESNGQPENNYKTTPPMLDSDGSFFLYSKLTVDKSRWQQGNVFSCSVMHEALHNHYTQKSLSLSPGK

SEQ ID NO: 428 - protein, 326 aa, Artificial Sequence
  Synthetic: IgG2.3-V224A
ASTKGPSVFPLAPCSRSTSESTAALGCLVKDYFPEPVTVSWNSGALTSGVHTFPAVLQSSGLYSLSSVVTVPSSNFGTQTYTCNVDHKPSNTKVDKTVERKSCAECPPCPAPPVAGPSVFLFPPKPKDTLMISRTPEVTCVVVDVSHEDPEVQFNWYVDGVEVHNAKTKPREEQFNSTFRVVSVLTVVHQDWLNGKEYKCKVSNKGLPAPIEKTISKTKGQPREPQVYTLPPSREEMTKNQVSLTCLVKGFYPSDIAVEWESNGQPENNYKTTPPMLDSDGSFFLYSKLTVDKSRWQQGNVFSCSVMHEALHNHYTQKSLSLSPGK

SEQ ID NO: 429 - protein, 326 aa, Artificial Sequence
  Synthetic: IgG2.3-E225A
ASTKGPSVFPLAPCSRSTSESTAALGCLVKDYFPEPVTVSWNSGALTSGVHTFPAVLQSSGLYSLSSVVTVPSSNFGTQTYTCNVDHKPSNTKVDKTVERKSCVACPPCPAPPVAGPSVFLFPPKPKDTLMISRTPEVTCVVVDVSHEDPEVQFNWYVDGVEVHNAKTKPREEQFNSTFRVVSVLTVVHQDWLNGKEYKCKVSNKGLPAPIEKTISKTKGQPREPQVYTLPPSREEMTKNQVSLTCLVKGFYPSDIAVEWESNGQPENNYKTTPPMLDSDGSFFLYSKLTVDKSRWQQGNVFSCSVMHEALHNHYTQKSLSLSPGK

SEQ ID NO: 430 - protein, 326 aa, Artificial Sequence
  Synthetic: IgG2.3-R133A
ASTKGPSVFPLAPCSASTSESTAALGCLVKDYFPEPVTVSWNSGALTSGVHTFPAVLQSSGLYSLSSVVTVPSSNFGTQTYTCNVDHKPSNTKVDKTVERKSCVECPPCPAPPVAGPSVFLFPPKPKDTLMISRTPEVTCVVVDVSHEDPEVQFNWYVDGVEVHNAKTKPREEQFNSTFRVVSVLTVVHQDWLNGKEYKCKVSNKGLPAPIEKTISKTKGQPREPQVYTLPPSREEMTKNQVSLTCLVKGFYPSDIAVEWESNGQPENNYKTTPPMLDSDGSFFLYSKLTVDKSRWQQGNVFSCSVMHEALHNHYTQKSLSLSPGK

SEQ ID NO: 431 - protein, 326 aa, Artificial Sequence
  Synthetic: IgG2.3-E137D
ASTKGPSVFPLAPCSRSTSDSTAALGCLVKDYFPEPVTVSWNSGALTSGVHTFPAVLQSSGLYSLSSVVTVPSSNFGTQTYTCNVDHKPSNTKVDKTVERKSCVECPPCPAPPVAGPSVFLFPPKPKDTLMISRTPEVTCVVVDVSHEDPEVQFNWYVDGVEVHNAKTKPREEQFNSTFRVVSVLTVVHQDWLNGKEYKCKVSNKGLPAPIEKTISKTKGQPREPQVYTLPPSREEMTKNQVSLTCLVKGFYPSDIAVEWESNGQPENNYKTTPPMLDSDGSFFLYSKLTVDKSRWQQGNVFSCSVMHEALHNHYTQKSLSLSPGK

SEQ ID NO: 432 - protein, 326 aa, Artificial Sequence
  Synthetic: IgG2.3-E137Q
ASTKGPSVFPLAPCSRSTSQSTAALGCLVKDYFPEPVTVSWNSGALTSGVHTFPAVLQSSGLYSLSSVVTVPSSNFGTQTYTCNVDHKPSNTKVDKTVERKSCVECPPCPAPPVAGPSVFLFPPKPKDTLMISRTPEVTCVVVDVSHEDPEVQFNWYVDGVEVHNAKTKPREEQFNSTFRVVSVLTVVHQDWLNGKEYKCKVSNKGLPAPIEKTISKTKGQPREPQVYTLPPSREEMTKNQVSLTCLVKGFYPSDIAVEWESNGQPENNYKTTPPMLDSDGSFFLYSKLTVDKSRWQQGNVFSCSVMHEALHNHYTQKSLSLSPGK

SEQ ID NO: 433 - protein, 326 aa, Artificial Sequence
  Synthetic: IgG2.3-S138T
ASTKGPSVFPLAPCSRSTSETTAALGCLVKDYFPEPVTVSWNSGALTSGVHTFPAVLQSSGLYSLSSVVTVPSSNFGTQTYTCNVDHKPSNTKVDKTVERKSCVECPPCPAPPVAGPSVFLFPPKPKDTLMISRTPEVTCVVVDVSHEDPEVQFNWYVDGVEVHNAKTKPREEQFNSTFRVVSVLTVVHQDWLNGKEYKCKVSNKGLPAPIEKTISKTKGQPREPQVYTLPPSREEMTKNQVSLTCLVKGFYPSDIAVEWESNGQPENNYKTTPPMLDSDGSFFLYSKLTVDKSRWQQGNVFSCSVMHEALHNHYTQKSLSLSPGK

SEQ ID NO: 434 - protein, 326 aa, Artificial Sequence
  Synthetic: IgG2.3-S138E
ASTKGPSVFPLAPCSRSTSEETAALGCLVKDYFPEPVTVSWNSGALTSGVHTFPAVLQSSGLYSLSSVVTVPSSNFGTQTYTCNVDHKPSNTKVDKTVERKSCVECPPCPAPPVAGPSVFLFPPKPKDTLMISRTPEVTCVVVDVSHEDPEVQFNWYVDGVEVHNAKTKPREEQFNSTFRVVSVLTVVHQDWLNGKEYKCKVSNKGLPAPIEKTISKTKGQPREPQVYTLPPSREEMTKNQVSLTCLVKGFYPSDIAVEWESNGQPENNYKTTPPMLDSDGSFFLYSKLTVDKSRWQQGNVFSCSVMHEALHNHYTQKSLSLSPGK

SEQ ID NO: 435 - protein, 326 aa, Artificial Sequence
  Synthetic: IgG2.3-E137A-S138I
ASTKGPSVFPLAPCSRSTSAITAALGCLVKDYFPEPVTVSWNSGALTSGVHTFPAVLQSSGLYSLSSVVTVPSSNFGTQTYTCNVDHKPSNTKVDKTVERKSCVECPPCPAPPVAGPSVFLFPPKPKDTLMISRTPEVTCVVVDVSHEDPEVQFNWYVDGVEVHNAKTKPREEQFNSTFRVVSVLTVVHQDWLNGKEYKCKVSNKGLPAPIEKTISKTKGQPREPQVYTLPPSREEMTKNQVSLTCLVKGFYPSDIAVEWESNGQPENNYKTTPPMLDSDGSFFLYSKLTVDKSRWQQGNVFSCSVMHEALHNHYTQKSLSLSPGK

SEQ ID NO: 436 - protein, 326 aa, Artificial Sequence
  Synthetic: IgG2.3-E137I-S138A
ASTKGPSVFPLAPCSRSTSIATAALGCLVKDYFPEPVTVSWNSGALTSGVHTFPAVLQSSGLYSLSSVVTVPSSNFGTQTYTCNVDHKPSNTKVDKTVERKSCVECPPCPAPPVAGPSVFLFPPKPKDTLMISRTPEVTCVVVDVSHEDPEVQFNWYVDGVEVHNAKTKPREEQFNSTFRVVSVLTVVHQDWLNGKEYKCKVSNKGLPAPIEKTISKTKGQPREPQVYTLPPSREEMTKNQVSLTCLVKGFYPSDIAVEWESNGQPENNYKTTPPMLDSDGSFFLYSKLTVDKSRWQQGNVFSCSVMHEALHNHYTQKSLSLSPGK

SEQ ID NO: 437 - protein, 326 aa, Artificial Sequence
  Synthetic: IgG2.3-R217G
ASTKGPSVFPLAPCSRSTSESTAALGCLVKDYFPEPVTVSWNSGALTSGVHTFPAVLQSSGLYSLSSVVTVPSSNFGTQTYTCNVDHKPSNTKVDKTVEGKSCVECPPCPAPPVAGPSVFLFPPKPKDTLMISRTPEVTCVVVDVSHEDPEVQFNWYVDGVEVHNAKTKPREEQFNSTFRVVSVLTVVHQDWLNGKEYKCKVSNKGLPAPIEKTISKTKGQPREPQVYTLPPSREEMTKNQVSLTCLVKGFYPSDIAVEWESNGQPENNYKTTPPMLDSDGSFFLYSKLTVDKSRWQQGNVFSCSVMHEALHNHYTQKSLSLSPGK

SEQ ID NO: 438 - protein, 326 aa, Artificial Sequence
  Synthetic: IgG2.3-R217A
ASTKGPSVFPLAPCSRSTSESTAALGCLVKDYFPEPVTVSWNSGALTSGVHTFPAVLQSSGLYSLSSVVTVPSSNFGTQTYTCNVDHKPSNTKVDKTVEAKSCVECPPCPAPPVAGPSVFLFPPKPKDTLMISRTPEVTCVVVDVSHEDPEVQFNWYVDGVEVHNAKTKPREEQFNSTFRVVSVLTVVHQDWLNGKEYKCKVSNKGLPAPIEKTISKTKGQPREPQVYTLPPSREEMTKNQVSLTCLVKGFYPSDIAVEWESNGQPENNYKTTPPMLDSDGSFFLYSKLTVDKSRWQQGNVFSCSVMHEALHNHYTQKSLSLSPGK

SEQ ID NO: 439 - protein, 326 aa, Artificial Sequence
  Synthetic: IgG2.3-R217I
ASTKGPSVFPLAPCSRSTSESTAALGCLVKDYFPEPVTVSWNSGALTSGVHTFPAVLQSSGLYSLSSVVTVPSSNFGTQTYTCNVDHKPSNTKVDKTVEIKSCVECPPCPAPPVAGPSVFLFPPKPKDTLMISRTPEVTCVVVDVSHEDPEVQFNWYVDGVEVHNAKTKPREEQFNSTFRVVSVLTVVHQDWLNGKEYKCKVSNKGLPAPIEKTISKTKGQPREPQVYTLPPSREEMTKNQVSLTCLVKGFYPSDIAVEWESNGQPENNYKTTPPMLDSDGSFFLYSKLTVDKSRWQQGNVFSCSVMHEALHNHYTQKSLSLSPGK

SEQ ID NO: 440 - protein, 326 aa, Artificial Sequence
  Synthetic: IgG2.3-R217E
ASTKGPSVFPLAPCSRSTSESTAALGCLVKDYFPEPVTVSWNSGALTSGVHTFPAVLQSSGLYSLSSVVTVPSSNFGTQTYTCNVDHKPSNTKVDKTVEEKSCVECPPCPAPPVAGPSVFLFPPKPKDTLMISRTPEVTCVVVDVSHEDPEVQFNWYVDGVEVHNAKTKPREEQFNSTFRVVSVLTVVHQDWLNGKEYKCKVSNKGLPAPIEKTISKTKGQPREPQVYTLPPSREEMTKNQVSLTCLVKGFYPSDIAVEWESNGQPENNYKTTPPMLDSDGSFFLYSKLTVDKSRWQQGNVFSCSVMHEALHNHYTQKSLSLSPGK

SEQ ID NO: 441 - protein, 326 aa, Artificial Sequence
  Synthetic: IgG2.3-R217K
ASTKGPSVFPLAPCSRSTSESTAALGCLVKDYFPEPVTVSWNSGALTSGVHTFPAVLQSSGLYSLSSVVTVPSSNFGTQTYTCNVDHKPSNTKVDKTVEKKSCVECPPCPAPPVAGPSVFLFPPKPKDTLMISRTPEVTCVVVDVSHEDPEVQFNWYVDGVEVHNAKTKPREEQFNSTFRVVSVLTVVHQDWLNGKEYKCKVSNKGLPAPIEKTISKTKGQPREPQVYTLPPSREEMTKNQVSLTCLVKGFYPSDIAVEWESNGQPENNYKTTPPMLDSDGSFFLYSKLTVDKSRWQQGNVFSCSVMHEALHNHYTQKSLSLSPGK

SEQ ID NO: 442 - protein, 326 aa, Artificial Sequence
  Synthetic: IgG2.3-V224I
ASTKGPSVFPLAPCSRSTSESTAALGCLVKDYFPEPVTVSWNSGALTSGVHTFPAVLQSSGLYSLSSVVTVPSSNFGTQTYTCNVDHKPSNTKVDKTVERKSCIECPPCPAPPVAGPSVFLFPPKPKDTLMISRTPEVTCVVVDVSHEDPEVQFNWYVDGVEVHNAKTKPREEQFNSTFRVVSVLTVVHQDWLNGKEYKCKVSNKGLPAPIEKTISKTKGQPREPQVYTLPPSREEMTKNQVSLTCLVKGFYPSDIAVEWESNGQPENNYKTTPPMLDSDGSFFLYSKLTVDKSRWQQGNVFSCSVMHEALHNHYTQKSLSLSPGK

SEQ ID NO: 443 - protein, 326 aa, Artificial Sequence
  Synthetic: IgG2.3-E225D
ASTKGPSVFPLAPCSRSTSESTAALGCLVKDYFPEPVTVSWNSGALTSGVHTFPAVLQSSGLYSLSSVVTVPSSNFGTQTYTCNVDHKPSNTKVDKTVERKSCVDCPPCPAPPVAGPSVFLFPPKPKDTLMISRTPEVTCVVVDVSHEDPEVQFNWYVDGVEVHNAKTKPREEQFNSTFRVVSVLTVVHQDWLNGKEYKCKVSNKGLPAPIEKTISKTKGQPREPQVYTLPPSREEMTKNQVSLTCLVKGFYPSDIAVEWESNGQPENNYKTTPPMLDSDGSFFLYSKLTVDKSRWQQGNVFSCSVMHEALHNHYTQKSLSLSPGK

SEQ ID NO: 444 - protein, 327 aa, Artificial Sequence
  Synthetic: IgG2-G4.1-G4-G4
ASTKGPSVFPLAPCSRSTSESTAALGCLVKDYFPEPVTVSWNSGALTSGVHTFPAVLQSSGLYSLSSVVTVPSSNFGTQTYTCNVDHKPSNTKVDKTVERKYGPPCPPCPAPEFLGGPSVFLFPPKPKDTLMISRTPEVTCVVVDVSQEDPEVQFNWYVDGVEVHNAKTKPREEQFNSTYRVVSVLTVLHQDWLNGKEYKCKVSNKGLPSSIEKTISKAKGQPREPQVYTLPPSQEEMTKNQVSLTCLVKGFYPSDIAVEWESNGQPENNYKTTPPVLDSDGSFFLYSRLTVDKSRWQEGNVFSCSVMHEALHNHYTQKSLSLSLGK

SEQ ID NO: 445 - protein, 326 aa, Artificial Sequence
  Synthetic: IgG4-G2.3-G2-G2
ASTKGPSVFPLAPCSRSTSESTAALGCLVKDYFPEPVTVSWNSGALTSGVHTFPAVLQSSGLYSLSSVVTVPSSSLGTKTYTCNVDHKPSNTKVDKRVESKSCVECPPCPAPPVAGPSVFLFPPKPKDTLMISRTPEVTCVVVDVSHEDPEVQFNWYVDGVEVHNAKTKPREEQFNSTFRVVSVLTVVHQDWLNGKEYKCKVSNKGLPAPIEKTISKTKGQPREPQVYTLPPSREEMTKNQVSLTCLVKGFYPSDIAVEWESNGQPENNYKTTPPMLDSDGSFFLYSKLTVDKSRWQQGNVFSCSVMHEALHNHYTQKSLSLSPGK

SEQ ID NO: 446 - protein, 327 aa, Artificial Sequence
  Synthetic: IgG2-G4.1-G2-G2
ASTKGPSVFPLAPCSRSTSESTAALGCLVKDYFPEPVTVSWNSGALTSGVHTFPAVLQSSGLYSLSSVVTVPSSNFGTQTYTCNVDHKPSNTKVDKTVERKYGPPCPPCPAPEFLGGPSVFLFPPKPKDTLMISRTPEVTCVVVDVSHEDPEVQFNWYVDGVEVHNAKTKPREEQFNSTFRVVSVLTVVHQDWLNGKEYKCKVSNKGLPAPIEKTISKTKGQPREPQVYTLPPSREEMTKNQVSLTCLVKGFYPSDIAVEWESNGQPENNYKTTPPMLDSDGSFFLYSKLTVDKSRWQQGNVFSCSVMHEALHNHYTQKSLSLSPGK

SEQ ID NO: 447 - protein, 326 aa, Artificial Sequence
  Synthetic: IgG4-G2.3-G4-G4
ASTKGPSVFPLAPCSRSTSESTAALGCLVKDYFPEPVTVSWNSGALTSGVHTFPAVLQSSGLYSLSSVVTVPSSSLGTKTYTCNVDHKPSNTKVDKRVESKSCVECPPCPAPPVAGPSVFLFPPKPKDTLMISRTPEVTCVVVDVSQEDPEVQFNWYVDGVEVHNAKTKPREEQFNSTYRVVSVLTVLHQDWLNGKEYKCKVSNKGLPSSIEKTISKAKGQPREPQVYTLPPSQEEMTKNQVSLTCLVKGFYPSDIAVEWESNGQPENNYKTTPPVLDSDGSFFLYSRLTVDKSRWQEGNVFSCSVMHEALHNHYTQKSLSLSLGK

SEQ ID NO: 448 - protein, 326 aa, Artificial Sequence
  Synthetic: IgG2-G2.3-G4-G4
ASTKGPSVFPLAPCSRSTSESTAALGCLVKDYFPEPVTVSWNSGALTSGVHTFPAVLQSSGLYSLSSVVTVPSSNFGTQTYTCNVDHKPSNTKVDKTVERKSCVECPPCPAPPVAGPSVFLFPPKPKDTLMISRTPEVTCVVVDVSQEDPEVQFNWYVDGVEVHNAKTKPREEQFNSTYRVVSVLTVLHQDWLNGKEYKCKVSNKGLPSSIEKTISKAKGQPREPQVYTLPPSQEEMTKNQVSLTCLVKGFYPSDIAVEWESNGQPENNYKTTPPVLDSDGSFFLYSRLTVDKSRWQEGNVFSCSVMHEALHNHYTQKSLSLSLGK

SEQ ID NO: 449 - protein, 327 aa, Artificial Sequence
  Synthetic: IgG4-G4.1-G2-G2
ASTKGPSVFPLAPCSRSTSESTAALGCLVKDYFPEPVTVSWNSGALTSGVHTFPAVLQSSGLYSLSSVVTVPSSSLGTKTYTCNVDHKPSNTKVDKRVESKYGPPCPPCPAPEFLGGPSVFLFPPKPKDTLMISRTPEVTCVVVDVSHEDPEVQFNWYVDGVEVHNAKTKPREEQFNSTFRVVSVLTVVHQDWLNGKEYKCKVSNKGLPAPIEKTISKTKGQPREPQVYTLPPSREEMTKNQVSLTCLVKGFYPSDIAVEWESNGQPENNYKTTPPMLDSDGSFFLYSKLTVDKSRWQQGNVFSCSVMHEALHNHYTQKSLSLSPGK

SEQ ID NO: 450 - protein, 327 aa, Artificial Sequence
  Synthetic: IgG4-G4.1-G1-G1
ASTKGPSVFPLAPCSRSTSESTAALGCLVKDYFPEPVTVSWNSGALTSGVHTFPAVLQSSGLYSLSSVVTVPSSSLGTKTYTCNVDHKPSNTKVDKRVESKYGPPCPPCPAPEFLGGPSVFLFPPKPKDTLMISRTPEVTCVVVDVSHEDPEVKFNWYVDGVEVHNAKTKPREEQYNSTYRVVSVLTVLHQDWLNGKEYKCKVSNKALPAPIEKTISKAKGQPREPQVYTLPPSREEMTKNQVSLTCLVKGFYPSDIAVEWESNGQPENNYKTTPPVLDSDGSFFLYSKLTVDKSRWQQGNVFSCSVMHEALHNHYTQKSLSLSPGK

SEQ ID NO: 451 - protein, 327 aa, Artificial Sequence
  Synthetic: IgG4.1
ASTKGPSVFPLAPCSRSTSESTAALGCLVKDYFPEPVTVSWNSGALTSGVHTFPAVLQSSGLYSLSSVVTVPSSSLGTKTYTCNVDHKPSNTKVDKRVESKYGPPCPPCPAPEFLGGPSVFLFPPKPKDTLMISRTPEVTCVVVDVSQEDPEVQFNWYVDGVEVHNAKTKPREEQFNSTYRVVSVLTVLHQDWLNGKEYKCKVSNKGLPSSIEKTISKAKGQPREPQVYTLPPSQEEMTKNQVSLTCLVKGFYPSDIAVEWESNGQPENNYKTTPPVLDSDGSFFLYSRLTVDKSRWQEGNVFSCSVMHEALHNHYTQKSLSLSLGK

SEQ ID NO: 452 - protein, 327 aa, Artificial Sequence
  Synthetic: IgG4.1-R214T
ASTKGPSVFPLAPCSRSTSESTAALGCLVKDYFPEPVTVSWNSGALTSGVHTFPAVLQSSGLYSLSSVVTVPSSSLGTKTYTCNVDHKPSNTKVDKTVESKYGPPCPPCPAPEFLGGPSVFLFPPKPKDTLMISRTPEVTCVVVDVSQEDPEVQFNWYVDGVEVHNAKTKPREEQFNSTYRVVSVLTVLHQDWLNGKEYKCKVSNKGLPSSIEKTISKAKGQPREPQVYTLPPSQEEMTKNQVSLTCLVKGFYPSDIAVEWESNGQPENNYKTTPPVLDSDGSFFLYSRLTVDKSRWQEGNVFSCSVMHEALHNHYTQKSLSLSLGK

SEQ ID NO: 453 - protein, 327 aa, Artificial Sequence
  Synthetic: IgG4.1-S217R
ASTKGPSVFPLAPCSRSTSESTAALGCLVKDYFPEPVTVSWNSGALTSGVHTFPAVLQSSGLYSLSSVVTVPSSSLGTKTYTCNVDHKPSNTKVDKRVERKYGPPCPPCPAPEFLGGPSVFLFPPKPKDTLMISRTPEVTCVVVDVSQEDPEVQFNWYVDGVEVHNAKTKPREEQFNSTYRVVSVLTVLHQDWLNGKEYKCKVSNKGLPSSIEKTISKAKGQPREPQVYTLPPSQEEMTKNQVSLTCLVKGFYPSDIAVEWESNGQPENNYKTTPPVLDSDGSFFLYSRLTVDKSRWQEGNVFSCSVMHEALHNHYTQKSLSLSLGK

SEQ ID NO: 454 - protein, 327 aa, Artificial Sequence
  Synthetic: IgG4.1-S217P
ASTKGPSVFPLAPCSRSTSESTAALGCLVKDYFPEPVTVSWNSGALTSGVHTFPAVLQSSGLYSLSSVVTVPSSSLGTKTYTCNVDHKPSNTKVDKRVEPKYGPPCPPCPAPEFLGGPSVFLFPPKPKDTLMISRTPEVTCVVVDVSQEDPEVQFNWYVDGVEVHNAKTKPREEQFNSTYRVVSVLTVLHQDWLNGKEYKCKVSNKGLPSSIEKTISKAKGQPREPQVYTLPPSQEEMTKNQVSLTCLVKGFYPSDIAVEWESNGQPENNYKTTPPVLDSDGSFFLYSRLTVDKSRWQEGNVFSCSVMHEALHNHYTQKSLSLSLGK

SEQ ID NO: 455 - protein, 440 aa, Artificial Sequence
  Synthetic: Heavy chain sequence of nivolumab
QVQLVESGGGVVQPGRSLRLDCKASGITFSNSGMHWVRQAPGKGLEWVAVIWYDGSKRYYADSVKGRFTISRDNSKNTLFLQMNSLRAEDTAVYYCATNDDYWGQGTLVTVSSASTKGPSVFPLAPCSRSTSESTAALGCLVKDYFPEPVTVSWNSGALTSGVHTFPAVLQSSGLYSLSSVVTVPSSSLGTKTYTCNVDHKPSNTKVDKRVESKYGPPCPPCPAPEFLGGPSVFLFPPKPKDTLMISRTPEVTCVVVDVSQEDPEVQFNWYVDGVEVHNAKTKPREEQFNSTYRVVSVLTVLHQDWLNGKEYKCKVSNKGLPSSIEKTISKAKGQPREPQVYTLPPSQEEMTKNQVSLTCLVKGFYPSDIAVEWESNGQPENNYKTTPPVLDSDGSFFLYSRLTVDKSRWQEGNVFSCSVMHEALHNHYTQKSLSLSLGK

SEQ ID NO: 456 - protein, 214 aa, Artificial Sequence
  Synthetic: Light chain sequence of nivolumab
EIVLTQSPATLSLSPGERATLSCRASQSVSSYLAWYQQKPGQAPRLLIYDASNRATGIPARFSGSGSGTDFTLTISSLEPEDFAVYYCQQSSNWPRTFGQGTKVEIKRTVAAPSVFIFPPSDEQLKSGTASVVCLLNNFYPREAKVQWKVDNALQSGNSQESVTEQDSKDSTYSLSSTLTLSKADYEKHKVYACEVTHQGLSSPVTKSFNRGEC

SEQ ID NO: 457 - protein, 326 aa, Artificial Sequence
  Synthetic: IgG2.3-R217L
ASTKGPSVFPLAPCSRSTSESTAALGCLVKDYFPEPVTVSWNSGALTSGVHTFPAVLQSSGLYSLSSVVTVPSSNFGTQTYTCNVDHKPSNTKVDKTVELKSCVECPPCPAPPVAGPSVFLFPPKPKDTLMISRTPEVTCVVVDVSHEDPEVQFNWYVDGVEVHNAKTKPREEQFNSTFRVVSVLTVVHQDWLNGKEYKCKVSNKGLPAPIEKTISKTKGQPREPQVYTLPPSREEMTKNQVSLTCLVKGFYPSDIAVEWESNGQPENNYKTTPPMLDSDGSFFLYSKLTVDKSRWQQGNVFSCSVMHEALHNHYTQKSLSLSPGK

SEQ ID NO: 458 - protein, 326 aa, Artificial Sequence
  Synthetic: IgG2.3-R217V
ASTKGPSVFPLAPCSRSTSESTAALGCLVKDYFPEPVTVSWNSGALTSGVHTFPAVLQSSGLYSLSSVVTVPSSNFGTQTYTCNVDHKPSNTKVDKTVEVKSCVECPPCPAPPVAGPSVFLFPPKPKDTLMISRTPEVTCVVVDVSHEDPEVQFNWYVDGVEVHNAKTKPREEQFNSTFRVVSVLTVVHQDWLNGKEYKCKVSNKGLPAPIEKTISKTKGQPREPQVYTLPPSREEMTKNQVSLTCLVKGFYPSDIAVEWESNGQPENNYKTTPPMLDSDGSFFLYSKLTVDKSRWQQGNVFSCSVMHEALHNHYTQKSLSLSPGK

SEQ ID NO: 459 - protein, 326 aa, Artificial Sequence
  Synthetic: IgG2.3-R217F
ASTKGPSVFPLAPCSRSTSESTAALGCLVKDYFPEPVTVSWNSGALTSGVHTFPAVLQSSGLYSLSSVVTVPSSNFGTQTYTCNVDHKPSNTKVDKTVEFKSCVECPPCPAPPVAGPSVFLFPPKPKDTLMISRTPEVTCVVVDVSHEDPEVQFNWYVDGVEVHNAKTKPREEQFNSTFRVVSVLTVVHQDWLNGKEYKCKVSNKGLPAPIEKTISKTKGQPREPQVYTLPPSREEMTKNQVSLTCLVKGFYPSDIAVEWESNGQPENNYKTTPPMLDSDGSFFLYSKLTVDKSRWQQGNVFSCSVMHEALHNHYTQKSLSLSPGK

SEQ ID NO: 460 - protein, 326 aa, Artificial Sequence
  Synthetic: IgG2.3-R217M
ASTKGPSVFPLAPCSRSTSESTAALGCLVKDYFPEPVTVSWNSGALTSGVHTFPAVLQSSGLYSLSSVVTVPSSNFGTQTYTCNVDHKPSNTKVDKTVEMKSCVECPPCPAPPVAGPSVFLFPPKPKDTLMISRTPEVTCVVVDVSHEDPEVQFNWYVDGVEVHNAKTKPREEQFNSTFRVVSVLTVVHQDWLNGKEYKCKVSNKGLPAPIEKTISKTKGQPREPQVYTLPPSREEMTKNQVSLTCLVKGFYPSDIAVEWESNGQPENNYKTTPPMLDSDGSFFLYSKLTVDKSRWQQGNVFSCSVMHEALHNHYTQKSLSLSPGK

SEQ ID NO: 461 - protein, 326 aa, Artificial Sequence
  Synthetic: IgG2.3-R217H
ASTKGPSVFPLAPCSRSTSESTAALGCLVKDYFPEPVTVSWNSGALTSGVHTFPAVLQSSGLYSLSSVVTVPSSNFGTQTYTCNVDHKPSNTKVDKTVEHKSCVECPPCPAPPVAGPSVFLFPPKPKDTLMISRTPEVTCVVVDVSHEDPEVQFNWYVDGVEVHNAKTKPREEQFNSTFRVVSVLTVVHQDWLNGKEYKCKVSNKGLPAPIEKTISKTKGQPREPQVYTLPPSREEMTKNQVSLTCLVKGFYPSDIAVEWESNGQPENNYKTTPPMLDSDGSFFLYSKLTVDKSRWQQGNVFSCSVMHEALHNHYTQKSLSLSPGK

SEQ ID NO: 462 - protein, 326 aa, Artificial Sequence
  Synthetic: IgG2.3-R217Y
ASTKGPSVFPLAPCSRSTSESTAALGCLVKDYFPEPVTVSWNSGALTSGVHTFPAVLQSSGLYSLSSVVTVPSSNFGTQTYTCNVDHKPSNTKVDKTVEYKSCVECPPCPAPPVAGPSVFLFPPKPKDTLMISRTPEVTCVVVDVSHEDPEVQFNWYVDGVEVHNAKTKPREEQFNSTFRVVSVLTVVHQDWLNGKEYKCKVSNKGLPAPIEKTISKTKGQPREPQVYTLPPSREEMTKNQVSLTCLVKGFYPSDIAVEWESNGQPENNYKTTPPMLDSDGSFFLYSKLTVDKSRWQQGNVFSCSVMHEALHNHYTQKSLSLSPGK

SEQ ID NO: 463 - protein, 326 aa, Artificial Sequence
  Synthetic: IgG2.3-R217W
ASTKGPSVFPLAPCSRSTSESTAALGCLVKDYFPEPVTVSWNSGALTSGVHTFPAVLQSSGLYSLSSVVTVPSSNFGTQTYTCNVDHKPSNTKVDKTVEWKSCVECPPCPAPPVAGPSVFLFPPKPKDTLMISRTPEVTCVVVDVSHEDPEVQFNWYVDGVEVHNAKTKPREEQFNSTFRVVSVLTVVHQDWLNGKEYKCKVSNKGLPAPIEKTISKTKGQPREPQVYTLPPSREEMTKNQVSLTCLVKGFYPSDIAVEWESNGQPENNYKTTPPMLDSDGSFFLYSKLTVDKSRWQQGNVFSCSVMHEALHNHYTQKSLSLSPGK

SEQ ID NO: 464 - protein, 327 aa, Artificial Sequence
  Synthetic: IgG2.3G1-AY-R217I
ASTKGPSVFPLAPCSRSTSESTAALGCLVKDYFPEPVTVSWNSGALTSGVHTFPAVLQSSGLYSLSSVVTVPSSNFGTQTYTCNVDHKPSNTKVDKTVEIKSCVECPPCPAPELLGGPSVFLFPPKPKDTLMISRTPEVTCVVVDVSHEDPEVKFNWYVDGVEVHNAKTKPREEQYNSTYRVVSVLTVLHQDWLNGKEYKCKVSNKALPAPIEKTISKAKGQPREPQVYTLPPSREEMTKNQVSLTCLVKGFYPSDIAVEWESNGQPENNYKTTPPVLDSDGSFFLYSKLTVDKSRWQQGNVFSCSVMHEALHNHYTQKSLSLSPGK

SEQ ID NO: 465 - protein, 327 aa, Artificial Sequence
  Synthetic: IgG2.3G1-AY-R217L
ASTKGPSVFPLAPCSRSTSESTAALGCLVKDYFPEPVTVSWNSGALTSGVHTFPAVLQSSGLYSLSSVVTVPSSNFGTQTYTCNVDHKPSNTKVDKTVELKSCVECPPCPAPELLGGPSVFLFPPKPKDTLMISRTPEVTCVVVDVSHEDPEVKFNWYVDGVEVHNAKTKPREEQYNSTYRVVSVLTVLHQDWLNGKEYKCKVSNKALPAPIEKTISKAKGQPREPQVYTLPPSREEMTKNQVSLTCLVKGFYPSDIAVEWESNGQPENNYKTTPPVLDSDGSFFLYSKLTVDKSRWQQGNVFSCSVMHEALHNHYTQKSLSLSPGK

SEQ ID NO: 466 - protein, 327 aa, Artificial Sequence
  Synthetic: IgG2.3G1-AY-R217V
ASTKGPSVFPLAPCSRSTSESTAALGCLVKDYFPEPVTVSWNSGALTSGVHTFPAVLQSSGLYSLSSVVTVPSSNFGTQTYTCNVDHKPSNTKVDKTVEVKSCVECPPCPAPELLGGPSVFLFPPKPKDTLMISRTPEVTCVVVDVSHEDPEVKFNWYVDGVEVHNAKTKPREEQYNSTYRVVSVLTVLHQDWLNGKEYKCKVSNKALPAPIEKTISKAKGQPREPQVYTLPPSREEMTKNQVSLTCLVKGFYPSDIAVEWESNGQPENNYKTTPPVLDSDGSFFLYSKLTVDKSRWQQGNVFSCSVMHEALHNHYTQKSLSLSPGK

SEQ ID NO: 467 - protein, 327 aa, Artificial Sequence
  Synthetic: IgG2.3G1.3f-AY-R217I
ASTKGPSVFPLAPCSRSTSESTAALGCLVKDYFPEPVTVSWNSGALTSGVHTFPAVLQSSGLYSLSSVVTVPSSNFGTQTYTCNVDHKPSNTKVDKTVEIKSCVECPPCPAPEAEGAPSVFLFPPKPKDTLMISRTPEVTCVVVDVSHEDPEVKFNWYVDGVEVHNAKTKPREEQYNSTYRVVSVLTVLHQDWLNGKEYKCKVSNKALPAPIEKTISKAKGQPREPQVYTLPPSREEMTKNQVSLTCLVKGFYPSDIAVEWESNGQPENNYKTTPPVLDSDGSFFLYSKLTVDKSRWQQGNVFSCSVMHEALHNHYTQKSLSLSPGK

SEQ ID NO: 468 - protein, 327 aa, Artificial Sequence
  Synthetic: IgG2.3G1.3f-AY-R217L
ASTKGPSVFPLAPCSRSTSESTAALGCLVKDYFPEPVTVSWNSGALTSGVHTFPAVLQSSGLYSLSSVVTVPSSNFGTQTYTCNVDHKPSNTKVDKTVELKSCVECPPCPAPEAEGAPSVFLFPPKPKDTLMISRTPEVTCVVVDVSHEDPEVKFNWYVDGVEVHNAKTKPREEQYNSTYRVVSVLTVLHQDWLNGKEYKCKVSNKALPAPIEKTISKAKGQPREPQVYTLPPSREEMTKNQVSLTCLVKGFYPSDIAVEWESNGQPENNYKTTPPVLDSDGSFFLYSKLTVDKSRWQQGNVFSCSVMHEALHNHYTQKSLSLSPGK

SEQ ID NO: 469 - protein, 11 aa, Artificial Sequence
  Synthetic: peptide
RLSCATSGFTF

SEQ ID NO: 470 - protein, 11 aa, Artificial Sequence
  Synthetic: peptide
AEDTAVYYCAR

SEQ ID NO: 471 - protein, 11 aa, Artificial Sequence
  Synthetic: peptide
WVAVILYDGSN

SEQ ID NO: 472 - protein, 11 aa, Artificial Sequence
  Synthetic: peptide
VILYDGSNKYY

1-64. (canceled)

65. A method of treating cancer in a subject having a tumor that expresses CD73, comprising administering to the subject a therapeutically effective amount of a CD73 antagonist and an immuno-oncology agent, wherein
(a) the CD73 antagonist is administered at a dose of about 150 mg to about 1600 mg, and the immuno-oncology agent is administered at a dose of about 50 mg to about 500 mg, once per week, once every 2 weeks, once every 3 weeks, or once every 4 four weeks, or
(b) the CD73 antagonist is administered at a dose of about 150 mg to about 1600 mg once per week and the immuno-oncology agent is administered at a dose of about 50 mg to about 500 mg once every 2 weeks, once every 3 weeks or once every 4 four weeks.

66. The method of claim 65, wherein
(a) the CD73 antagonist is administered at a dose of about 600 mg once per week or once every 2 weeks, and
(b) the immuno-oncology agent is administered at about 240 mg once every 2 weeks or at about 480 mg once every 4 weeks.

67. The method of claim 65, wherein the CD73 antagonist and the immuno-oncology agent are administered for 1 to 10 cycles, wherein each cycle is a period of 28 days.

68. The method of claim 65, wherein the CD73 antagonist and the immuno-oncology agent are administered on the same day.

69. The method of claim 65, wherein the CD73 antagonist and immuno-oncology agent are formulated for intravenous administration.

70. The method of claim 65, wherein the CD73 antagonist and immuno-oncology agent are formulated separately.

71. The method of claim 65, wherein the CD73 antagonist and immuno-oncology agent are formulated together.

72. The method of claim 65, wherein the CD73 antagonist is administered prior to administration of the immuno-oncology agent.

73. The method of claim 65, wherein the CD73 antagonist is administered after administration of the immuno-oncology agent.

74. The method of claim 65, wherein the CD73 antagonist and immuno-oncology agent are administered concurrently.

75. The method of claim 65, wherein the cancer is a cancer in which CD73 is expressed on the membrane of tumor cells.

76. The method of claim 65, wherein the cancer comprises tumors and wherein the tumor comprises tumor infiltrating lymphocytes (TILs) that express the target of the immuno-oncology agent.

77. The method of claim 65, wherein the cancer or tumor is selected from the group of lung adenocarcinoma, thyroid carcinoma, pancreatic adenocarcinoma, endometrial carcinoma, colon adenocarcinoma, lung squamous cell carcinoma, head and neck squamous cell carcinoma, and ovarian adenocarcinoma.

78. The method of claim 65, wherein the treatment produces at least one therapeutic effect chosen from a reduction in size of a tumor, reduction in number of metastatic lesions over time, complete response, partial response, and stable disease.

79. The method of claim 65, wherein the CD73 antagonist is an anti-CD73 antibody, or antigen binding portion thereof, comprising:
(a) heavy chain CDR1, CDR2, and CDR3 sequences comprising SEQ ID NOs: 5, 6, and 7, respectively, and light chain CDR1, CDR2, and CDR3 sequences comprising SEQ ID NOs: 9, 10, and 11, respectively;
(b) heavy chain CDR1, CDR2, and CDR3 sequences comprising SEQ ID NOs: 5, 6, and 7, respectively, and light chain CDR1, CDR2, and CDR3 sequences comprising SEQ ID NOs: 13, 14, and 15, respectively;
(c) heavy chain CDR1, CDR2, and CDR3 sequences comprising SEQ ID NOs: 17, 18, and 19, respectively, and light chain CDR1, CDR2, and CDR3 sequences comprising SEQ ID NOs: 21, 22, and 23, respectively;
(d) heavy chain CDR1, CDR2, and CDR3 sequences comprising SEQ ID NOs: 17, 18, and 19, respectively, and light chain CDR1, CDR2, and CDR3 sequences comprising SEQ ID NOs: 25, 26, and 27, respectively;
(e) heavy chain CDR1, CDR2, and CDR3 sequences comprising SEQ ID NOs: 17, 18, and 19, respectively, and light chain CDR1, CDR2, and CDR3 sequences comprising SEQ ID NOs: 29, 30, and 31, respectively;
(f) heavy chain CDR1, CDR2, and CDR3 sequences comprising SEQ ID NOs: 33, 34, and 35, respectively, and light chain CDR1, CDR2, and CDR3 sequences comprising SEQ ID NOs: 37, 38, and 39, respectively;
(g) heavy chain CDR1, CDR2, and CDR3 sequences comprising SEQ ID NOs: 41, 42, and 43, respectively, and light chain CDR1, CDR2, and CDR3 sequences comprising SEQ ID NOs: 45, 46, and 47, respectively;
(h) heavy chain CDR1, CDR2, and CDR3 sequences comprising SEQ ID NOs: 41, 42, and 43, respectively, and light chain CDR1, CDR2, and CDR3 sequences comprising SEQ ID NOs: 49, 50, and 51, respectively;
(i) heavy chain CDR1, CDR2, and CDR3 sequences comprising SEQ ID NOs: 53, 54, and 55, respectively, and light chain CDR1, CDR2, and CDR3 sequences comprising SEQ ID NOs: 57, 58, and 59, respectively;
(j) heavy chain CDR1, CDR2, and CDR3 sequences comprising SEQ ID NOs: 61, 62, and 63, respectively, and light chain CDR1, CDR2, and CDR3 sequences comprising SEQ ID NOs: 65, 66, and 67, respectively;
(k) heavy chain CDR1, CDR2, and CDR3 sequences comprising SEQ ID NOs: 69, 70, and 71, respectively, and light chain CDR1, CDR2, and CDR3 sequences comprising SEQ ID NOs: 73, 74, and 75, respectively;
(l) heavy chain CDR1, CDR2, and CDR3 sequences comprising SEQ ID NOs: 69, 70, and 71, respectively, and light chain CDR1, CDR2, and CDR3 sequences comprising SEQ ID NOs: 77, 78, and 79, respectively;
(m) heavy chain CDR1, CDR2, and CDR3 sequences comprising SEQ ID NOs: 81, 82, and 83, respectively, and light chain CDR1, CDR2, and CDR3 sequences comprising SEQ ID NOs: 85, 86, and 87, respectively; or
(n) heavy chain CDR1, CDR2, and CDR3 sequences comprising SEQ ID NOs: 89, 90, and 91, respectively, and light chain CDR1, CDR2, and CDR3 sequences comprising SEQ ID NOs: 93, 94, and 95, respectively.

80. The method of claim 79, wherein the anti-CD73 antibody, or antigen binding portion thereof, comprises
(a) heavy chain CDR1, CDR2, and CDR3 sequences comprising SEQ ID NOs: 5, 6, and 7, respectively, and light chain CDR1, CDR2, and CDR3 sequences comprising SEQ ID NOs: 9, 10, and 11, respectively, or
(b) heavy chain CDR1, CDR2, and CDR3 sequences comprising SEQ ID NOs: 5, 6, and 7, respectively, and light chain CDR1, CDR2, and CDR3 sequences comprising SEQ ID NOs: 13, 14, and 15, respectively.

81. The method of claim 79, wherein the anti-CD73 antibody, or antigen-binding portion thereof, comprises heavy and light chain variable region amino acid sequences, respectively comprising:
(a) SEQ ID NOs: 4 and 8
(b) SEQ ID NOs: 4 and 12;
(c) SEQ ID NOs: 16 and 20;
(d) SEQ ID NOs: 16 and 24;
(e) SEQ ID NOs: 16 and 28;
(f) SEQ ID NOs: 32 and 36;
(g) SEQ ID NOs: 40 and 44;
(h) SEQ ID NOs: 40 and 48;
(i) SEQ ID NOs: 52 and 56;
(j) SEQ ID NOs: 60 and 64;
(k) SEQ ID NOs: 68 and 72;
(l) SEQ ID NOs: 68 and 76;
(m) SEQ ID NOs: 80 and 84;
(n) SEQ ID NOs: 88 and 92;
(o) SEQ ID NOs: 135 and 8; or
(p) SEQ ID NOs: 135 and 12.

82. The method of claim 79, wherein the anti-CD73 antibody, or antigen binding portion thereof, comprises a heavy chain variable region comprising the amino acid sequence set forth in SEQ ID NO: 135 and a light chain variable region comprising the amino acid sequence set forth in SEQ ID NO: 8.

83. The method of claim 79, wherein the anti-CD73 antibody, or antigen binding portion thereof, comprises a heavy chain variable region comprising the amino acid sequence set forth in SEQ ID NO: 135 and a light chain variable region comprising the amino acid sequence set forth in SEQ ID NO: 12.

84. The method of claim 79, wherein the anti-CD73 antibody, or antigen binding portion thereof, comprises heavy chain and light chain amino acid sequences respectively comprising:
(a) SEQ ID NOs: 100 and 101;
(b) SEQ ID NOs: 100 and 102;
(c) SEQ ID NOs: 103 and 104;
(d) SEQ ID NOs: 103 and 105;
(e) SEQ ID NOs: 103 and 106;
(f) SEQ ID NOs: 107 and 108;
(g) SEQ ID NOs: 109 and 110;
(h) SEQ ID NOs: 109 and 111;
(i) SEQ ID NOs: 112 and 113;
(j) SEQ ID NOs: 114 and 115;
(k) SEQ ID NOs: 116 and 117;
(l) SEQ ID NOs: 116 and 118;
(m) SEQ ID NOs: 119 and 120;
(n) SEQ ID NOs: 121 and 122;
(o) SEQ ID NOs: 133 and 101; or
(p) SEQ ID NOs: 133 and 102.

85. The method of claim 79, wherein the anti-CD73 antibody comprises a heavy chain comprising the amino acid sequence set forth in SEQ ID NO: 133 or 189 and a light chain comprising the amino acid sequence set forth in SEQ ID NO: 101.

86. The method of claim 79, wherein the anti-CD73 antibody comprises a heavy chain comprising the amino acid sequence set forth in SEQ ID NO: 133 or 189 and a light chain comprising the amino acid sequence set forth in SEQ ID NO: 102.

87. The method of claim 65 wherein the immuno-oncology agent is selected from the group consisting of a PD-1 antagonist, a PD-L1 antagonist, a CTLA-4 antagonist, and a LAG-3 antagonist.

88. The method of claim 87, wherein the immuno-oncology agent is an antibody or antigen binding portion thereof.

89. The method of claim 88, wherein the immuno-oncology agent is an anti-PD-1 antibody or antigen binding portion thereof.

90. The method of claim 89, wherein the anti-PD-1 antibody, or antigen binding portion thereof, comprises a heavy chain CDR1, CDR2, and CDR3 sequences comprising SEQ ID NOs: 383, 384, and 385, respectively, and light chain CDR1, CDR2, and CDR3 sequences comprising SEQ ID NOs: 386, 387, and 388, respectively.

91. The method of claim 90, wherein the anti-PD-1 antibody, or antigen binding portion thereof, comprises heavy and light chain variable region sequences set forth in SEQ ID NOs: 381 and 382, respectively.

92. The method of claim 65, wherein
the CD73 antagonist is an anti-CD73 antibody, or antigen binding portion thereof, comprising heavy chain CDR1, CDR2, and CDR3 sequences comprising SEQ ID NOs: 5, 6, and 7, respectively, and light chain CDR1, CDR2, and CDR3 sequences comprising SEQ ID NOs: 9, 10, and 11, respectively,
the immuno-oncology agent is an anti-PD-1 antibody, or antigen binding portion thereof, comprising heavy chain CDR1, CDR2, and CDR3 sequences comprising SEQ ID NOs: 383-385, respectively, and light chain CDR1, CDR2, and CDR3 sequences comprising SEQ ID NOs: 386-388, respectively, and
the CD73 antagonist is administered at a dose of about 600 mg once per week or once every 2 weeks, and the immuno-oncology agent is administered at about 240 mg once every 2 weeks or at about 480 mg once every 4 weeks.

93. The method of claim 79, wherein the anti-CD73 antibody, or antigen binding portion thereof, exhibits one or more of the following properties:
(1) binding to human CD73, e.g., bead bound (soluble) human dimeric human CD73 isoform 1 and 2, e.g., with a K_{D} of 10 nM or less (e.g., 0.01 nM to 10 nM), e.g., as measured by BIACORE® SPR analysis;
(2) binding to membrane bound human CD73, e.g., with an EC50 of 1 nM or less (e.g., 0.01 nM to 1 nM);
(3) binding to cynomolgus CD73, e.g., binding to membrane bound cynomolgus CD73, e.g, with an EC50 of 10 nM or less (e.g., 0.01 nM to 10 nM);
(4) inhibition of human CD73 enzymatic activity, e.g., with an EC50 of 10 nM or less;
(5) inhibition of cyno CD73 enzymatic activity, e.g., with an EC50 of 10 nM or less;
(6) inhibition of endogenous (cellular) human CD73 enzymatic activity in Calu6 cells with an EC50 of 10 nM or less;
(7) inhibition of human CD73 enzymatic activity in vivo;
(8) internalization, e.g., antibody mediated (or dependent) CD73 internalization, into cells, e.g., with a T_{1/2} of less than 1 hour, 30 minutes or 10 minutes and/or a Ymax of at least 70%, 80% or 90%;
(9) binding to a conformational epitope on human CD73, e.g., a discontinuous epitope within the amino acid sequence (SEQ ID NO: 1) which includes all or a portion of amino acid residues FTKVQQIRRAEPNVLLLDA (SEQ ID NO: 96) and/or LYLPYKVLPVGDEVVG (SEQ ID NO: 97);
(10) competing in either direction or both directions for binding to human CD73 with CD73.4-1, CD73.4-2, CD73.3, 11F11-1, 11F11-2, 4C3-1, 4C3-2, 4C3-3, 4D4, 10D2-1, 10D2-2, 11A6, 24H2, 5F8-1, 5F8-2, 6E11 and/or 7A11; and
(11) interacting with human CD73 in a similar pattern as CD73.4, as determined by X-ray crystallography.

94. A kit for treating cancer in a human patient, the kit comprising:
(a) a dose of an anti-CD73 antibody comprising CDR1, CDR2 and CDR3 domains of the heavy chain variable region having the sequence set forth in SEQ ID NO: 135, and CDR1, CDR2 and CDR3 domains of the light chain variable region having the sequence set forth in SEQ ID NO: 8 or 12;
(b) a dose of an immuno-oncology agent, wherein the immuno-oncology agent is an anti-PD-1 antibody comprising CDR1, CDR2 and CDR3 domains of the heavy chain variable region having the sequence set forth in SEQ ID NO: 381, and CDR1, CDR2 and CDR3 domains of the light chain variable region having the sequence set forth in SEQ ID NO: 382; and
(c) instructions for using the anti-CD73 antibody and immuno-oncology agent in the method of claim 65.
